(19) United States
(12) Patent Application Publication
(10) Pub. No.: US 2005/0164220 A1
(43) Pub. Date: Jul. 28, 2005

(54) Susceptibility gene for human stroke: method of treatment

(75) Inventors: Solveig Gretarsdottir, Reykjavik (IS); Gudmar Thorleifsson, Reykjavik (IS); Jeffrey R. Gulcher, Lake Barrington, IL (US)

Correspondence Address: HAMILTON, BROOK, SMITH & REYNOLDS, P.C., 530 VIRGINIA ROAD, P.O. BOX 9133, CONCORD, MA, 01742-9133, US

(73) Assignee: deCODE genetics ehf., Reykjavik (IS)

(21) Appl. No.: 10/868,397

(22) Filed: Jun. 14, 2004

Related U.S. Application Data
(63) Continuation-in-part of application No. PCT/US03/29906, filed on Sep. 25, 2003.
Application No. PCT/US03/29906 is a continuation of application No. 10/650,120, filed on Aug. 27, 2003.
Application No. 10/650,120 is a continuation of application No. 10/419,723, filed on Apr. 18, 2003.
Application No. 10/419,723 is a continuation of application No. 10/255,120, filed on Sep. 25, 2002.
Application No. 10/255,120 is a continuation-in-part of application No. 10/067,514, filed on Feb. 4, 2002, now abandoned.
Application No. 10/067,514 is a continuation-in-part of application No. 09/811,352, filed on Mar. 19, 2001, now abandoned.

(51) Int. Cl. C12Q 1/68

(52) U.S. Cl. 435/6

(57) ABSTRACT

A role of the human PDE4D gene in stroke is disclosed. Methods for diagnosis, prediction of clinical course and treatment for stroke using polymorphisms in the PDE4D gene are also disclosed.

### RELATED APPLICATIONS

[0001] This application is a continuation-in-part of PCT Application No. PCT/US03/29906, filed Sep. 25, 2003, which is a continuation of and claims priority to U.S. application Ser. No. 10/650,120, filed Aug. 27, 2003, which is a continuation-in-part of U.S. application Ser. No. 10/419,723 filed Apr. 18, 2003, which is a continuation-in-part of U.S. application Ser. No. 10/255,120, filed Sep. 25, 2002, which is a continuation-in-part of U.S. application Ser. No. 10/067,514, filed Feb. 4, 2002, which is a continuation-in-part of U.S. application Ser. No. 09/811,352, filed Mar. 19, 2001. The entire teachings of the above applications are incorporated herein by reference.

### BACKGROUND OF THE INVENTION

[0002] Stroke is a common and serious disease. Each year in the United States more than 600,000 individuals suffer a stroke and more than 160,000 die from stroke-related causes (Sacco, R. L. et al., Stroke 28, 1507-17 (1997)). In western countries stroke is the leading cause of severe disability and the third leading cause of death (Bonita, R., Lancet 339, 342-4 (1992)). The lifetime risk of those who reach the age of 40 exceeds 10%.

[0003] The clinical phenotype of stroke is complex but is broadly divided into ischemic (accounting for 80-90%) and hemorrhagic stroke (10-20%) (Caplan, L. R. Caplan's Stroke: A Clinical Approach, 1-556 (Butterworth-Heinemann, 2000)). Ischemic stroke is further subdivided into large vessel occlusive disease (referred to here as carotid stroke), usually due to atherosclerotic involvement of the common and internal carotid arteries, small vessel occlusive disease, thought to be a non-atherosclerotic narrowing of small end-arteries within the brain, and cardiogenic stroke due to blood clots arising from the heart usually on the background of atrial fibrillation or ischemic (atherosclerotic) heart disease (Adams, H. P., Jr. et al., Stroke 24, 35-41 (1993)). Therefore, it appears that stroke is not one disease but a heterogeneous group of disorders reflecting differences in the pathogenic mechanisms (Alberts, M. J. Genetics of Cerebrovascular Disease, 386 (Futura Publishing Company, Inc., New York, 1999); Hassan, A. & Markus, H. S. Brain 123, 1784-812 (2000)). However, all forms of stroke share risk factors such as hypertension, diabetes, hyperlipidemia, and smoking (Sacco, R. L. et al., Stroke 28, 1507-17 (1997); Leys, D. et al., J. Neurol. 249, 507-17 (2002)). Family history of stroke is also an independent risk factor suggesting the existence of genetic factors that may interact with environmental factors (Hassan, A. & Markus, H. S. Brain 123, 1784-812 (2000); Brass, L. M. & Alberts, M. J. Baillieres Clin. Neurol. 4, 221-45 (1995)).

[0004] The genetic determinants of the common forms of stroke are still largely unknown. There are examples of mutations in specific genes that cause rare Mendelian forms of stroke such as the Notch3 gene in CADASIL (cerebral autosomal dominant arteriopathy with subcortical infarctions and leukoencephalopathy) (Tournier-Lasserve, E. et al., Nat. Genet. 3, 256-9 (1993); Joutel, A. et al., Nature 383, 707-10 (1996)), Cystatin C in the Icelandic type of hereditary cerebral hemorrhage with amyloidosis (Palsdottir, A. et al., Lancet 2, 603-4 (1988)), APP in the Dutch type of hereditary cerebral hemorrhage (Levy, E. et al., Science 248, 1124-6 (1990)) and the KRIT1 gene in patients with hereditary cavernous angioma (Gunel, M. et al., Proc. Natl. Acad. Sci. USA 92, 6620-4 (1995); Sahoo, T. et al., Hum. Mol. Genet. 8, 2325-33 (1999)). None of these rare forms of stroke occur on the background of atherosclerosis, and therefore, the corresponding genes are not likely to play roles in the common forms of stroke which most often occur with atherosclerosis.

[0005] It is very important for the health care system to develop strategies to prevent stroke. Once a stroke happens, irreversible cell death occurs in a significant portion of the brain supplied by the blood vessel affected by the stroke. Unfortunately, the neurons that die cannot be revived or replaced from a stem cell population. Therefore, there is a need to prevent strokes from happening in the first place. Although we already know of certain clinical risk factors that increase stroke risk (listed above), there is an unmet medical need to define the genetic factors involved in stroke to more precisely define stroke risk. Further, if predisposing alleles are common in the general population and the specificity of predicting a disease based on their presence is low, additional loci such as protective loci are needed for meaningful prediction of disposition of the disease state. There is also a great need for therapeutic agents for preventing the first stroke or further strokes in individuals who have suffered a previous stroke or transient ischemic attack.

### SUMMARY OF THE INVENTION

[0006] A locus conferring susceptibility to ischemic stroke to chromosome 5q12 in the Icelandic population has been mapped and the identification of phosphodiesterase 4D (PDE4D) as the gene at 5q12 contributing to the risk of ischemic stroke has been reported. This locus was extensively fine mapped and tested for association to stroke. Most striking is that haplotypes can be classified into three distinct groups: wild type, at-risk and protective. Additionally, a significant disregulation of multiple PDE4D isoforms in stroke patients was observed. The strongest association was within the PDE4D, especially to the two major subtypes of ischemic stroke, carotid and cardiogenic stroke. We have found variation in PDE4D that more than doubles the risk for cardiogenic and carotid stroke, two of the most common forms of ischemic stroke. We have shown that there are at least 9 isoforms of PDE4D at the mRNA level and the protein level. The basis for these isoforms is the use of alternative 5 prime exons that are alternatively spliced into a common set of exons defining the catalytic domain as well as, in the case of the long forms, a set of exons defining a common core in the regulatory domain. The PDE4D gene is involved in the pathogenesis of stroke. The PDE4D gene may be involved through artherosclerosis, the major pathological process underlying ischemic stroke. Our results indicate that atherosclerosis is a cAMP disease resulting from disregulation of its levels within the vasculature.

[0007] In one aspect, the invention relates to methods of diagnosing a predisposition to stroke. The methods of diagnosing a predisposition to stroke in an individual include detecting the presence of a polymorphism in PDE4D, as well as detecting alterations in expression of a PDE4D polypeptide or isoform, such as the presence of, or relative expression of different splicing variants of PDE4D polypeptides. For example, it may be that the ratio of certain splice variants could be used as a diagnostic marker for stroke predisposition. Also an abnormal splice form can be detected (that is one that is not normally expressed but is created from a DNA sequence mutation that leads to an abnormal splice form to be created from the primary transcript) may be created from mutations in the PDE4D gene. For example, new splice sites might be created from a single base substitution within an intron that is inappropriately used as a splice acceptor or donor site, resulting in an abnormal message which is likely to have a premature stop codon leading to a truncated form of PDE4D protein. The alterations in expression can be quantitative, qualitative, or both quantitative and qualitative. The methods of the invention allow the accurate diagnosis of stroke at or before disease onset, thus reducing or minimizing the debilitating effects of stroke. The methods of the invention also diagnose those individuals who are protected against developing stroke even in the face of other risk factors including but not restricted to hypertension, diabetes, hyperlipidemia, smoking history, previous stroke, TIA, MI or PAOD, or carriers of stroke associated gene variants. In one embodiment, predisposition to stroke or susceptibility to stroke can be assessed by determining PDE4D isoform levels in the individual compared to control levels, wherein a difference in isoform expression is indicative of predisposition or susceptibility to stroke. Preferably, the level of expression of PDE4D7 and/or PDE4D9 is assessed.

[0008] The invention additionally relates to an assay for identifying agents that alter (e.g., enhance or inhibit) the activity or expression or transcription of one or more PDE4D polypeptides or isoforms. Such an assay may also identify agents that alter the relative expression of one or more PDE4D isoforms with respect to other isoforms at either the mRNA level or polypeptide level. For example, a cell, cellular fraction, or solution containing a PDE4D polypeptide or a fragment or derivative thereof, can be contacted with an agent to be tested, and the level of PDE4D polypeptide expression or activity can be assessed. Alternatively, a cell, or cell with artificial DNA construct with part or all of the PDE4D gene with or without a reporter gene can be used to identify agents that may directly affect transcription at one or more of the many alternative PDE4D promoters upstream of the alternative 5 prime exons or splicing efficiency of the primary transcript to one or more mRNA isoforms. The activity or expression of more than one PDE4D polypeptides can be assessed concurrently (or the corresponding reporter gene activity) (e.g., the cell, cellular fraction, or solution can contain more than one type of PDE4D polypeptide, such as different splicing variants, and the levels of the different polypeptides or splicing mRNA variants can be assessed).

[0009] Agents that enhance or inhibit PDE4D mRNA or polypeptide expression or activity are also included in the current invention, as are methods of altering (enhancing or inhibiting) PDE4D mRNA or polypeptide expression or activity by contacting a cell containing PDE4D gene, mRNA, and/or polypeptide, or by contacting the PDE4D gene, mRNA, and/or polypeptide, with an agent that enhances or inhibits expression or activity of PDE4D mRNA or polypeptide. In another embodiment, isoform mRNA and/or protein levels can be altered, compared to control levels, using the agents of the invention.

[0010] Additionally, the invention pertains to pharmaceutical compositions comprising the nucleic acids of the invention, the polypeptides of the invention, and/or the agents that alter activity of PDE4D polypeptide. The invention further pertains to methods of treating stroke, by administering PDE4D therapeutic agents, such as nucleic acids of the invention, polypeptides of the invention, the agents that alter activity of PDE4D polypeptide, or compositions comprising the nucleic acids, polypeptides, and/or the agents that alter activity of PDE4D polypeptide.

[0011] The invention further relates to methods for preventing the occurrence of stroke in an individual in need thereof by regulating a PDE4D mRNA and/or polypeptide isoform level compared to control levels, whereby the regulated isoform level mimics the level of a healthy individual. Isoform expression at the mRNA and/or polypeptide level can be regulated using the agents and pharmaceutical compositions of the invention, by genetic alteration, by altering the ratio of isoforms and/or their absolute expression. In one embodiment, isoforms PDE4D7 and/or PDE4D9 can be regulated.

[0012] The invention further provides a method of diagnosing susceptibility to stroke in an individual. This method comprises screening for one of the at-risk haplotypes in the phosphodiesterase 4D gene that is more frequently present in an individual susceptible to stroke, compared to the frequency of its presence in the general population, wherein the presence of an at-risk haplotype is indicative of a susceptibility to stroke. An “at-risk haplotype” is intended to embrace one or a combination of haplotypes described herein over the PDE4D gene that show high correlation to stroke. In one embodiment, the at-risk haplotype is characterized by the presence of at least one single nucleotide polymorphism at nucleic acid positions at risk haplotype 1 is G at nucleic acid position 142780 respectively, relative to SEQ ID NO: 1 and allele 0 of microsatellite marker AC0088181-1. In another embodiment, the at-risk haplotype 2 is characterized by the presence of at least one single nucleotide polymorphism and microsatellite marker at nucleic acid positions 142780, 135112, 132562, 131865, 129361, 129360, 125304, 123426, 123312, 120628, 118914, 111781, 111252, 109301, 107849, 105225, 104552, 102977, 100795, 99035, 88614, 88456, 83119, 82244, 80127, 78552, relative to SEQ ID NO: 1 and allele 0 microsatellite marker AC0088181-1.

[0013] In yet another embodiment, the at-risk haplotype 3 is characterized by the presence of at least one polymorphism at nucleic acid positions 138806, 131865, 129361, 120628, 91470 relative to SEQ ID NO: 1.

[0014] Also described are methods for diagnosing susceptibility to stroke in an individual comprising screening for an at-risk haplotype in the phosphodiesterase 4D gene that is more frequently present in an individual susceptible to stroke (affected), compared to the frequency of its presence in a healthy individual (control) wherein the screening for the presence of an at-risk haplotype within or near PDE4D that significantly correlates with at least one of the haplotypes described herein or stroke susceptibility. As an example of a simple test for correlation would be a Fisher-exact test on a two by two table. Given a cohort of chromosomes the two by two table is constructed out of the number of chromosomes that include both of the haplotypes, one of the haplotype but not the other and neither of the haplotypes.

[0015] A protective haplotype is intended to embrace one or a combination of haplotypes described herein over the PDE4D gene that show a protective characteristic or property of a reduced risk of stroke. The particular combination of genetic markers (haplotypes) are present at a higher than expected frequency in controls than patients. Individuals with a protective allele or haplotype are about 30% less likely to have a stroke compared to the general population. In one embodiment, a protective haplotype is characterized by the presence of at least one single nucleotide polymorphism, such as the allele A at nucleotide position 142780 relative to SEQ ID NO: 1. The presence of the polymorphisms that comprise the at-risk haplotype or protective haplotype can be determined by electrophoretic analysis, restriction length polymorphism analysis, fluorescence energy transfer detection, kinetic PCR, allele specific PCR, sequence analysis, hybridization analysis or other known techniques.

[0016] Kits for diagnosing susceptibility to stroke in an individual are also disclosed and comprise primers for nucleic acid amplification of a region of PDE4D comprising the at-risk haplotype and/or protective haplotype.

[0017] The first major application of the current invention involves prediction of those at higher risk of developing a stroke. Diagnostic tests that define genetic factors contributing to stroke might be used together with or independent of the known clinical risk factors to define an individual's risk relative to the general population. Better means for identifying those individuals at risk for stroke should lead to better prophylactic and treatment regimens, including more aggressive management of the current clinical risk factors such as hypertension, diabetes, hypercholesterolemia, hypertriglyceridemia, obesity, and inflammatory components as reflected by increased C-reactive protein levels or other inflammatory markers. Information on genetic risk may be used by physicians to help convince particular patients to adjust life style and quit smoking. This invention provides the means to define a genetic component that doubles an individual's risk for stroke. Also described are means to define the genetic components that protect an individual from stroke.

[0018] The second major application of the current invention is the specific identification of a rate-limiting pathway involved in stroke. While many have attempted to find genes that are over-expressed or under-expressed in atherosclerosis plaques in the carotid arteries, the vast majority of the changes seen in diseased blood vessels compared to normal blood vessels are simply a reaction to the underlying process of atherosclerosis and stroke predisposition and are not the underlying cause. A disease gene with genetic variation that is significantly more common in stroke patients as compared to controls represents a specifically validated causative step in the pathogenesis of stroke. That is, the uncertainty about whether a gene is causative or simply reactive to the disease process is eliminated. The protein encoded by the disease gene defines a rate-limiting molecular pathway involved in the biological process of stroke predisposition. The proteins encoded by such stroke genes or its interacting proteins in its molecular pathway may represent drug targets that may be selectively modulated by small molecule, protein, antibody, or nucleic acid therapies. Such specific information is greatly needed since stroke prevention and treatment is a major unmet medical need that affects over a half-million Americans each year. Also useful is determining the gene that is protective against stroke. The proteins encoded by the protective gene and the biological pathway that it is a member may represent another target selectively modulated by small molecule, protein antibody or nucleic acid therapies.

[0019] A third application of the current invention is its use to predict an individual's response to a particular drug, even drugs that do not act on PDE4D or its pathway. It is a well-known phenomenon that in general, patients do not respond equally to the same drug. Much of the differences in drug response to a given drug is thought to be based on genetic and protein differences among individuals in certain genes and their corresponding pathways. Our invention defines the PDE4D pathway and its effect on cAMP levels in cells where it is expressed as one key molecular pathway involved in stroke risk. Some current or future therapeutic agents may be able to affect this pathway directly or indirectly and therefore, be effective in those patients whose stroke risk is in part determined by PDE4D pathway genetic variation. On the other hand, those same drugs may be less effective or ineffective in those patients who do not have at risk variation in the PDE4D gene or pathway. Therefore, PDE4D variation or haplotypes may be used as a pharmacogenomic diagnostic to predict drug response and guide choice of therapeutic agent in a given individual.

[0020] The invention helps meet the unmet medical needs in at least two major ways: 1) it provides a means to define patients at higher risk for stroke than the general population who can be more aggressively managed by their physicians in an effort to prevent stroke; and 2) it defines a drug target that can be used to screen and develop therapeutic agents that can be used to prevent stroke before it happens or prevent a second stroke in those who have already suffered a stroke or transient ischemic attack.

### BRIEF DESCRIPTION OF THE DRAWINGS

[0021] The foregoing and other objects, features and advantages of the invention will be apparent from the following more particular description of certain embodiments of the invention, as illustrated in the accompanying drawings.

[0022] FIGS. 1.1 and 1.2 show two family pedigrees each affected by several of the stroke subtypes, including hemorrhagic stroke.

[0023] FIGS. 2.1, 2.2 and 2.3 show the genetic, combined and physical maps for locating the PDE4D gene using 30 polymorphic markers. For the combined map, all markers have been assigned in the genetic and physical map unless otherwise indicated (* indicates marker only assigned in the physical map; ** indicates markers only assigned in genetic map).

[0024] FIG. 3 shows the schematic representations of PDE4D splice variants. Splice variants PDE4D9 are novel, as well as exons D7A-1, D7A-2, D7A-3, D8 and D9. Splice variants 4DN1, 4DN2 and 4DN3 (Miro, et al., Biochem. Biophys. Res._Comm., 274: 415-421 (2002), and 4D1, 4D2, 4D3, 4D4 and 4D5 are known (Bolger et al., Biochem. J. pt. 2: 539-548 (1997).

[0025] FIG. 4 is a graphic representation showing PDE4D isoform expression in EBV transformed cells (expression of PDE4D3 and PDE4D9 below detection limits).

[0026] FIG. 5 is a graphic representation showing expression of PDE4D isoforms in EBV transformed cells from patients with or without the stroke-associated haplotype.

[0027] FIG. 6 is a graphic representation showing expression of PDE4D isoforms in EBV cells from controls with or without the stroke-associated haplotype.

[0028] FIGS. 7.1 to 7.10 show the amino acid sequences for the isoforms of the PDE4D gene. SEQ ID NO: 2 is D4; SEQ ID NO: 3 is N2; SEQ ID NO: 4 is D5; SEQ ID NO: 5 is N3; SEQ ID NO: 6 is D3; SEQ ID NO: 7 is N1; SEQ ID NO: 8 is D8; SEQ ID NO: 9 is D1; and SEQ ID NO: 10 is D2.

[0029] FIGS. 8.1 and 8.2 list all publicly available PDE4D mRNAs and novel cDNA segments identified by deCODE genetics.

[0030] FIGS. 9.1 to 9.351 show the genomic sequence of the human PDE4D gene.

[0031] FIGS. 10.1 to 10.3 show a graphic representation showing the single marker allelic association within the PDE4D gene. FIG. 10.1 is a schematic showing the gene structures. FIG. 10.2 shows graphic representation of the microsatellite and SNP distribution within the PDE4D gene. FIG. 10.3 shows graphic representation of the single marker allelic association across the PDE4D gene for both microsatellites (filled circles) and SNPs (open circles); negative log p-valve versus the physical location in kilobases.

[0032] FIGS. 11.1 to 11.3 graphically depict the haplotype association for carotid and cardiogenic stroke combined. Estimated haplotype frequencies for patients and controls respectively, are indicated within parentheses. FIG. 11.1 is a comparison of groups of haplotypes constructed from SNP45 and AC008818-1, two markers separated by 6 kb. Note that X is a composite allele that denotes jointly all alleles of AC008818-1 except allele 0. Apart from haplotype A0 that is not found in our samples, other haplotypes can be grouped into three groups with distinct risks. Each arrow corresponds to a comparison between two groups and RR is the estimated risk of the group the arrow is pointing at relative to the other group. The difference between 1 and the information (Info) is a measure of the fraction of information that is lost due to uncertainty in phase and missing genotypes. FIG. 11.2 shows intermediate results when the investigation is extended from SNP45 and AC008818-1, which are both in LD block B, to include 25 SNPs in LD block C. H_{C} is the at-risk haplotype, identified in FIG. 13 and L_{C} is a composite haplotype that denotes jointly all haplotypes of the 25 SNPs except H_{C}. Together with AC008818-1 and SNP45, the haplotypes here span 64 kb. Haplotype G0 in A is split into extended haplotypes G0H_{C} and G0L_{C}. G0H_{C} has significantly higher risk than G0L_{C}, and the risk of G0L_{C} is not distinguishable from the wild type GX. FIG. 11.3 shows a refinement of the groupings in A—G0L_{C} is moved from the at-risk group to the wild type group. Also noted is that the extended haplotype AXH_{C} does not exist indicating that blocks B and C are in LD.

[0033] FIG. 12 is a schematic representation of the physical map of STRK1 interval showing all genes and mRNAs in region. Markers identified with an asterisk (*) indicate those with significant single marker association.

[0034] FIGS. 13.1 to 13.3 show a graphical depiction of the linkage disequilibrium (LD) and haplotypes in the 5′end of PDE4D gene. FIG. 13.1 shows pairwise linkage disequilibrium between SNPs in a 600 kb region in the 5′ end of PDE4D. The markers are plotted equidistant. Two measures of LD are shown: D′ in the upper left triangle and p-values in the lower right triangle. This region can be divided into three blocks of strong LD, each with limited haplotype diversity, block Λ, block B and block C. The lines indicate the position of the three exons D7-1, D7-2 and D7-3 and the microsatellite marker AC008818-1. FIG. 13.2 show all common haplotypes identified within each of the three blocks. Association results for all the haplotypes are presented in Table 2C. FIG. 13.3 depicts the percentage of chromosomes within each block that match one of the common haplotypes.

[0035] FIGS. 14.1-14.172 lists the sequences of the flanking sequences and polymorphisms for SNPs 1-261.

### DETAILED DESCRIPTION OF THE INVENTION

[0036] The first major stroke locus, STRK1, was mapped to 5q12 using a genome-wide search for susceptibility genes in the common forms of stroke. A broad but rigorous definition of the phenotype was used including patients with ischemic stroke, transient ischemic attack (TIA), and hemorrhagic stroke. The lod score after adding a higher density of markers (one marker every 1 cM) was 4.40 (P=3.9×10⁻⁶) at marker D5S2080. The lod score increased to 4.9 after the hemorrhagic stroke patients were removed, suggesting that the gene at the locus is primarily important for ischemic stroke. The most promising region harboring a stroke susceptibility gene was narrowed down to a segment less than 6 cM (approximately 3.8 Mb), from D5S1474 to D5S398, as defined by a decrease of one in LOD score (will be referred to as the “one-LOD interval” hereafter).

[0037] We describe here the positional cloning of a stroke susceptibility gene located in the STRK1 locus. This region was extensively fine-mapped and tested for association to stroke. The strongest association found in the one-LOD interval was within the phosphodiesterase 4D gene (PDE4D), a member of the large superfamily of cyclic nucleotide phosphodiesterases. The strongest signal observed at PDE4D was to the two major subtypes of ischemic stroke, carotid and cardiogenic stroke. Relative expression of PDE4D isoforms correlated with stroke and with the genetic variation within PDE4D which is associated to stroke. Our results suggest that this gene is involved in pathogenesis of stroke through atherosclerosis, the major pathological process underlying stroke.

[0038] Our results also indicate that genetic variation in the PDE4D gene is associated with ischemic stroke. The direct involvement of PDE4D is strongly supported by both linkage and haplotype association. Multiple markers and haplotypes within the PDE4D gene show strong association to stroke. The haplotypes can be classified into three distinct groups, wild type, at-risk and protective. We first identified the association using microsatellite markers, and supplementing the microsatellite data with a denser set of SNPs further supported this. The strongest association was to the two ischemic subtypes, carotid and cardiogenic stroke. This gene shows no association to small vessel occlusive disease, the form of stroke thought to be independent of atherosclerosis. Haplotype analyses show that the most significant haplotype extends over an area of 260 kb covering the first exon of the PDE4D gene. The haplotype is significantly associated to carotid and cardiogenic stroke with a relative risk of 2.3 and approximately 47% of carotid/cardiogenic stroke patients carry at least one copy of this haplotype. This same haplotype has a relative risk of 1.8 for stroke in general. This haplotype extends over the 5′exon unique to the PDE4D7 isoform and the presumed promoter region of this isoform suggesting that the functional variation may be involved in transcriptional regulation. This hypothesis is also supported by our PDE4D expression analysis that shows that there is significant correlation between the disease associated haplotype and the level of PDE4D7 message.

[0039] The strongest association found for this PDE4D haplotype was to the two major subtypes of ischemic stroke, carotid and cardiogenic stroke suggesting a role for this gene in the vascular biology of atherosclerosis. While there are multiple etiologies for ischemic stroke, atherosclerosis remains the most important one. Atherosclerosis is a chronic progressive disease characterized by accumulation of lipids, fibrous, and cellular elements within the large arteries. These lesions can grow sufficiently large to impede blood flow and, more importantly, their surfaces can rupture leading to local thrombus formation occluding the blood vessel and causing a stroke or myocardial infarction. The major pathological process for the two ischemic subtypes, carotid and cardiogenic stroke is atherosclerosis. First, it is the major cause of stenotic and occlusive lesions of the internal and common carotids that lead to carotid strokes. Second, cardiac thrombi which shed emboli to the brain most commonly occur on the background of coronary artery disease, such as following acute myocardial infarction or ischemic cardiomyopathy, and/or due to atrial fibrillation on the basis of poor compliance of ischemic ventricles (diastolic dysfunction/stiffening). Although atrial fibrillation may occur on the background of other diseases such as valvular disease, hyperthyroidism, and hypertension, in the age group that tends to suffer from stroke, ischemic heart disease remains one of the most important causes. Ischemic stroke resulting from occlusion of small penetrating arteries within the brain (small vessel occlusive disease or lacunar stroke) is generally thought to result from local endothelial proliferation since atherosclerosis only occurs in larger arteries. PDE4D does not show association to small vessel stroke, consistent with it role in atherosclerosis. In summary, atherosclerosis accounts for the majority of all strokes, particularly carotid and cardiogenic stroke, two subphenotypes that show the strongest association to the PDE4D gene.

Representative Target Population

[0040] An individual at risk for stroke is an individual who has at least one risk factor, such as previous stroke or TIA, an at-risk haplotype in one or more stroke risk genes, an at-risk haplotype for the PDE4D gene; a polymorphism in a PDE4D gene; disregulation of PDE4D isoform expression; diabetes; hypertension; hypercholesterolemia; elevated lp(a); obesity; a past or current smoker; an elevated inflammatory marker (e.g., a marker such as C-reactive protein (CRP), serum amyloid Λ, fibrinogen, tissue necrosis factor-alpha, a soluble vascular cell adhesion molecule (sVCAM), a soluble intervascular adhesion molecule (sICAM), E-selectin, matrix metalloprotease type-1, matrix metalloprotease type-2, matrix metalloprotease type-3, and matrix metalloprotease type-9); increased LDL cholesterol and/or decreased HDL cholesterol; and/or at least one previous myocardial infarction, concurrent MI, acute coronary syndrome, stable angina, atherosclerosis, carotid stenosis, peripheral vascular occlusive disease, or requires treatment for restoration of coronary artery blood flow (e.g., angioplasty, stent, coronary artery bypass graft).

[0041] An individual who has a protective haplotype is one who is less likely to have a stroke. In another embodiment of the invention, an individual who is at risk for stroke is an individual who has a polymorphism in a PDE4D gene, in which the presence of the polymorphism is indicative of a susceptibility to stroke. An individual who has a protective haplotype and less likely to have a stroke is an individual who has a polymorphism in a PDE4D gene such as the A allele at nucleotide position 142780 relative to SEQ ID NO: 1, in which the presence of the polymorphism is indicative of a protection from stroke. The term “gene,” as used herein, refers to not only the sequence of nucleic acids encoding a polypeptide, but also the promoter regions, transcription enhancement elements, splice donor/acceptor sites, splice enhancer and silencer sequences and other regulators of splicing, and other non-transcribed nucleic acid elements. Representative polymorphisms include those presented in Table 111, below.

[0042] In one embodiment of the invention, an individual who is at risk for stroke is an individual who has an at-risk haplotype in PDE4D, as described herein, particularly but not limited to ischemic stroke. Increased risk for the two major subtypes of ischemic stroke, carotid and cardiogenic stroke, can be assessed by screening for at-risk haplotype that comprises SNP5PDM361194, SNP5PDM368135, SNP5PDM370640, SNP5PDM379372 and SNP5PDM408531 at the 5′ UTR of PDE4D7. Results reported herein indicate that PDE4D is involved in pathogenesis of stroke through atherosclerosis. The major pathological process for carotid stroke and cardiogenic stroke is atherosclerosis. Thus, an individual who is at-risk for atherosclerosis, peripheral arterial occlusive disease, or myocardial infarction can also benefit from the teachings of the invention.

Assessment for At-Risk and Protective Haplotypes

[0043] A “haplotype,” as described herein, refers to a combination of genetic markers (“alleles”), such as those set forth in Tables 1, 2C, 4A and 4B. In a certain embodiment, the haplotype can comprise one or more alleles, two or more alleles, three or more alleles, four or more alleles, or five or more alleles. The genetic markers are particular “alleles” at “polymorphic sites” associated with PDE4D. A nucleotide position at which more than one sequence is possible in a population (either a natural population or a synthetic population, e.g., a library of synthetic molecules), is referred to herein as a “polymorphic site”. Where a polymorphic site is a single nucleotide in length, the site is referred to as a single nucleotide polymorphism (“SNP”). For example, if at a particular chromosomal location, one member of a population has an adenine and another member of the population has a thymine at the same position, then this position is a polymorphic site, and, more specifically, the polymorphic site is a SNP. Polymorphic sites can allow for differences in sequences based on substitutions, insertions or deletions. Each version of the sequence with respect to the polymorphic site is referred to herein as an “allele” of the polymorphic site. Thus, in the previous example, the SNP allows for both an adenine allele and a thymine allele.

[0044] Typically, a reference sequence is referred to for a particular sequence. Alleles that differ from the reference are referred to as “variant” alleles. For example, the reference PDE4D sequence is described herein by SEQ ID NO: 1. The term, “variant PDE4D”, as used herein, refers to a sequence that differs from SEQ ID NO: 1, but is otherwise substantially similar. The genetic markers that make up the haplotypes described herein are PDE4D variants.

[0045] Additional variants can include changes that affect a polypeptide, e.g., the PDE4D polypeptide. These sequence differences, when compared to a reference nucleotide sequence, can include the insertion or deletion of a single nucleotide, or of more than one nucleotide, resulting in a frame shift; the change of at least one nucleotide, resulting in a change in the encoded amino acid; the change of at least one nucleotide, resulting in the generation of a premature stop codon; the deletion of several nucleotides, resulting in a deletion of one or more amino acids encoded by the nucleotides; the insertion of one or several nucleotides, such as by unequal recombination or gene conversion, resulting in an interruption of the coding sequence of a reading frame; duplication of all or a part of a sequence; transposition; or a rearrangement of a nucleotide sequence, as described in detail above. Such sequence changes alter the polypeptide encoded by a PDE4D nucleic acid. For example, if the change in the nucleic acid sequence causes a frame shift, the frame shift can result in a change in the encoded amino acids, and/or can result in the generation of a premature stop codon, causing generation of a truncated polypeptide. Alternatively, a polymorphism associated with stroke or a susceptibility to stroke can be a synonymous change in one or more nucleotides (i.e., a change that does not result in a change in the amino acid sequence). Such a polymorphism can, for example, alter splice sites, affect the stability or transport of mRNA, or otherwise affect the transcription or translation of the polypeptide. The polypeptide encoded by the reference nucleotide sequence is the “reference” polypeptide with a particular reference amino acid sequence, and polypeptides encoded by variant alleles are referred to as “variant” polypeptides with variant amino acid sequences.

[0046] Haplotypes are a combination of genetic markers, e.g., particular alleles at polymorphic sites. The haplotypes described herein, e.g., having markers such as those shown in Table 3, Table 4A and 4B, are found more frequently in individuals with stroke than in individuals without stroke. Therefore, these haplotypes have predictive value for detecting stroke or a susceptibility to stroke in an individual. The haplotypes described herein are a combination of various genetic markers, e.g., SNPs and microsatellites. Therefore, detecting haplotypes can be accomplished by methods known in the art for detecting sequences at polymorphic sites, such as the methods described above.

[0047] In certain methods described herein, an individual who is at risk for stroke is an individual in whom an at-risk haplotype is identified. In one embodiment, the at-risk haplotype is one that confers a significant risk of stroke. In one embodiment, significance associated with a haplotype is measured by an odds ratio. In a further embodiment, the significance is measured by a percentage. In one embodiment, a significant risk is measured as an odds ratio of at least about 1.2, including but not limited to: 1.2, 1.3, 1.4, 1.5, 1.6, 1.7, 1.8 and 1.9. In a further embodiment, an odds ratio of at least 1.2 is significant. In a further embodiment, an odds ratio of at least about 1.5 is significant. In a further embodiment, a significant increase in risk is at least about 1.7 is significant. In a further embodiment, a significant increase in risk is at least about 20%, including but not limited to about 25%, 30%, 35%, 40%, 45%, 50%, 55%, 60%, 65%, 70%, 75%, 80%, 85%, 90%, 95% and 98%. In a further embodiment, a significant increase in risk is at least about 50%. It is understood however, that identifying whether a risk is medically significant may also depend on a variety of factors, including the specific disease, the haplotype, and often, environmental factors.

[0048] An at-risk haplotype in, or comprising portions of, the PDE4D gene, is one where the haplotype is more frequently present in an individual at risk for stroke (affected), compared to the frequency of its presence in a healthy individual (control), and wherein the presence of the haplotype is indicative of stroke or susceptibility to stroke. A protective haplotype in or comprising portions of the PDE4D gene is one where the haplotype is more frequently present in an individual where the haplotype is protective against being affected by stroke compared to the frequency of its presence in an individual with stroke. The presence of the haplotype is indicative of a protection from stroke or protection from susceptibility to stroke as described above.

[0049] Standard techniques for genotyping for the presence of SNPs and/or microsatellite markers can be used, such as fluorescent-based techniques (Chen, et al., Genome Res. 9, 492 (1999)), PCR, LCR, Nested PCR and other techniques for nucleic acid amplification. In one embodiment, the method comprises assessing in an individual the presence or frequency of SNPs and/or microsatellites in, comprising portions of, the PDE4Dgene, wherein an excess or higher frequency of the SNPs and/or microsatellites compared to a healthy control individual is indicative that the individual has stroke, or is susceptible to stroke. See, for example, Table 1, Table 2C, Table 2D, Table 3, Table 4A and 4B (below) for SNPs and markers that can form haplotypes that can be used as screening tools. These markers and SNPs can be identified in at-risk haploptypes. For example, an at-risk haplotype can include microsatellite markers and/or SNPs such as those set forth in Table 2C, Table 4B and 4B. The presence of the haplotype is indicative of stroke, or a susceptibility to stroke, and therefore is indicative of an individual who falls within a target population for the treatment methods described herein.

[0050] Haplotype analysis first involves defining a candidate susceptibility locus using LOD scores. The defined regions are then ultra-fine mapped with microsatellite markers with an average spacing between markers of less than 100 kb. All usable microsatellite markers that found in public databases and mapped within that region can be used. In addition, microsatellite markers identified within the deCODE genetics sequence assembly of the human genome can be used. The frequencies of haplotypes in the patient and the control groups using an expectation-maximization algorithm can be estimated (Dempster A. et al., 1977. J. R. Stat. Soc. B, 39: 1-389). An implementation of this algorithm that can handle missing genotypes and uncertainty with the phase can be used. Under the null hypothesis, the patients and the controls are assumed to have identical frequencies. Using a likelihood approach, an alternative hypothesis where a candidate at-risk-haplotype, which can include the markers described herein, is allowed to have a higher frequency in patients than controls, while the ratios of the frequencies of other haplotypes are assumed to be the same in both groups is tested. Likelihoods are maximized separately under both hypotheses and a corresponding 1-df likelihood ratio statistics is used to evaluate the statistic significance.

[0051] To look for at-risk-haplotypes in the 1-lod drop or protective haplotypes, for example, association of all possible combinations of genotyped markers is studied, provided those markers span a practical region. The combined patient and control groups can be randomly divided into two sets, equal in size to the original group of patients and controls. The haplotype analysis is then repeated and the most significant p-value registered is determined. This randomization scheme can be repeated, for example, over 100 times to construct an empirical distribution of p-values. In a preferred aspect, a p-value of <0.05 is indicative of an at-risk haplotype. A detailed description of haplotype analysis and p-value determinations is found in Gretarsdottir S. et al., Nature Genetics, Nat Genet. Oct. 35 (2): 131-8 On line publication, Sep. 21, 2003).

[0052] In one embodiment, the at-risk haplotype is characterized by the presence of the polymorphism(s) represented by one or a combination of single nucleotide polymorphisms at nucleic acid positions 1425923, 1415979, 1414804, 1371388, 1307403 and 1257206, relative to SEQ ID NO: 1. In another embodiment, a diagnostic method for susceptibility to stroke can comprise determining the presence of at-risk haplotype represented by one or a combination of single nucleotide polymorphisms and microsatellite markers at nucleic acid positions 263539, 252772, 189780, 175259, 171240, 136550 and 120628, relative to SEQ ID NO: 1. In another embodiment, the at-risk haplotype is characterized by the following SNPs: SNP5PDM361194, SNP5PDM368135, SNP5PDM370640, SNP5PDM379372, and SNP5PDM408531. In one embodiment, the protective haplotype comprises the A allele of SNP45 at position 142780 relative to SEQ ID NO: 1. This haplotype is particularly useful for assessing susceptibility to the two major subtypes of ischemic stroke, carotid and cardiogenic stroke. In another embodiment, an at-risk haplotype, particularly for carotid and cardiogenic stroke, is characterized by use of microsatellite marker AC008818-1 to define the presence of an at-risk allele.

Nucleic Acid Therapeutic Agents

[0053] In another embodiment, a nucleic acid of the invention; a nucleic acid complementary to a nucleic acid of the invention; or a portion of such a nucleic acid (e.g., an oligonucleotide as described below); or a nucleic acid encoding a PDE4D polypeptide, can be used in “antisense” therapy, in which a nucleic acid (e.g., an oligonucleotide) which specifically hybridizes to the mRNA and/or genomic DNA of a nucleic acid is administered or generated in situ. The antisense nucleic acid that specifically hybridizes to the mRNA and/or DNA inhibits expression of the polypeptide encoded by that mRNA and/or DNA, e.g., by inhibiting translation and/or transcription. Binding of the antisense nucleic acid can be by conventional base pair complementarity, or, for example, in the case of binding to DNA duplexes, through specific interaction in the major groove of the double helix.

[0054] An antisense construct can be delivered, for example, as an expression plasmid as described above. When the plasmid is transcribed in the cell, it produces RNA that is complementary to a portion of the mRNA and/or DNA that encodes a PDE4D polypeptide. Alternatively, the antisense construct can be an oligonucleotide probe that is generated ex vivo and introduced into cells; it then inhibits expression by hybridizing with the mRNA and/or genomic DNA of the polypeptide. In one embodiment, the oligonucleotide probes are modified oligonucleotides that are resistant to endogenous nucleases, e.g., exonucleases and/or endonucleases, thereby rendering them stable in vivo. Exemplary nucleic acid molecules for use as antisense oligonucleotides are phosphoramidate, phosphothioate and methylphosphonate analogs of DNA (see also U.S. Pat. Nos. 5,176,996, 5,264,564 and 5,256,775). Additionally, general approaches to constructing oligomers useful in antisense therapy are also described, for example, by Van der Krol et al. (Biotechniques 6: 958-976 (1988)); and Stein et al. (Cancer Res. 48: 2659-2668 (1988)). With respect to antisense DNA, oligodeoxyribonucleotides derived from the translation initiation site are preferred.

[0055] To perform antisense therapy, oligonucleotides (mRNA, cDNA or DNA) are designed that are complementary to mRNA encoding the polypeptide. The antisense oligonucleotides bind to mRNA transcripts and prevent translation. Absolute complementarity, although preferred, is not required. A sequence “complementary” to a portion of an RNA, as referred to herein, indicates that a sequence has sufficient complementarity to be able to hybridize with the RNA, forming a stable duplex; in the case of double-stranded antisense nucleic acids, a single strand of the duplex DNA may thus be tested, or triplex formation may be assayed. The ability to hybridize will depend on both the degree of complementarity and the length of the antisense nucleic acid, as described in detail above. Generally, the longer the hybridizing nucleic acid, the more base mismatches with an RNA it may contain and still form a stable duplex (or triplex, as the case may be). One skilled in the art can ascertain a tolerable degree of mismatch by use of standard procedures.

[0056] The oligonucleotides used in antisense therapy can be DNA, RNA, or chimeric mixtures or derivatives or modified versions thereof, single-stranded or double-stranded. The oligonucleotides can be modified at the base moiety, sugar moiety, or phosphate backbone, for example, to improve stability of the molecule, hybridization, etc. The oligonucleotides can include other appended groups such as peptides (e.g. for targeting host cell receptors in vivo), or agents facilitating transport across the cell membrane (see, e.g., Letsinger et al., Proc. Natl. Acad. Sci. USA 86: 6553-6556 (1989); Lemaitre et al., Proc. Natl. Acad. Sci. USA 84: 648-652 (1987); PCT International Publication No. WO 88/09810) or the blood-brain barrier (see, e.g., PCT International Publication No. WO 89/10134), or hybridization-triggered cleavage agents (see, e.g., Krol et al., BioTechniques 6: 958-976 (1988)) or intercalating agents. (See, e.g., Zon, Pharm. Res. 5: 539-549 (1988)). To this end, the oligonucleotide may be conjugated to another molecule (e.g., a peptide, hybridization triggered cross-linking agent, transport agent, hybridization-triggered cleavage agent).

[0057] The antisense molecules are delivered to cells that express a PDE4D polypeptide in vivo. A number of methods can be used for delivering antisense DNA or RNA to cells; e.g., antisense molecules can be injected directly into the tissue site, or modified antisense molecules, designed to target the desired cells (e.g., antisense linked to peptides or antibodies that specifically bind receptors or antigens expressed on the target cell surface) can be administered systematically. Alternatively, in a another embodiment, a recombinant DNA construct is utilized in which the antisense oligonucleotide is placed under the control of a strong promoter (e.g., pol III or pol II). The use of such a construct to transfect target cells in the patient results in the transcription of sufficient amounts of single stranded RNAs that will form complementary base pairs with the endogenous transcripts and thereby prevent translation of the mRNA. For example, a vector can be introduced in vivo such that it is taken up by a cell and directs the transcription of an antisense RNA. Such a vector can remain episomal or become chromosomally integrated, as long as it can be transcribed to produce the desired antisense RNA. Such vectors can be constructed by recombinant DNA technology methods standard in the art and described above. For example, a plasmid, cosmid, YAC or viral vector can be used to prepare the recombinant DNA construct that can be introduced directly into the tissue site. Alternatively, viral vectors can be used which selectively infect the desired tissue, in which case administration may be accomplished by another route (e.g., systemically).

[0058] In another aspect of the invention, small double-stranded interfering RNA (RNA interference (RNAi)) can be used. RNAi is a post-transcription process, in which double-stranded RNA is introduced, and sequence-specific gene silencing results, though catalytic degradation of the targeted mRNA. See, e.g., Elbashir, S. M. et al., Nature 411: 494-498 (2001); Lee, N. S., Nature Biotech. 19: 500-505 (2002); Lee, S-K. et al., Nature Medicine 8 (7): 681-686 (2002), the entire teachings of these references are incorporated herein by reference.

[0059] RNAi is used routinely to investigate gene function in a high throughput fashion or to modulate gene expression in human diseases (Chi et al., PNAS, 100 (11): 6343-6346 (2003)).

[0060] Introduction of long double standed RNA leads to sequence-specific degradation of homologous gene transcripts. The long double stranded RNA is metabolized to small 21-23 nucleotide siRNA (small interfering RNA). The siRNA then binds to protein complex RISC(RNA-induced silencing complex) with dual function helicase. The helicase has RNAas activity and is able to unwind the RNA. The unwound si RNA allows an antisense strand to bind to a target. This results in sequence dependent degradation of cognate mRNA. Aside from endogenous RNAi, exogenous RNAi, chemically synthesized or recombinantly produced can also be used.

[0061] Endogenous expression of a gene product can also be reduced by inactivating or “knocking out” the gene or its promoter using targeted homologous recombination (e.g., see Smithies et al., Nature 317: 230-234 (1985); Thomas & Capecchi, Cell 51: 503-512 (1987); Thompson et al., Cell 5: 313-321 (1989)). For example, an altered, non-functional gene (or a completely unrelated DNA sequence) flanked by DNA homologous to the endogenous gene (either the coding regions or regulatory regions of the gene) can be used, with or without a selectable marker and/or a negative selectable marker, to transfect cells that express the gene in vivo. Insertion of the DNA construct, via targeted homologous recombination, results in inactivation of the gene. The recombinant DNA constructs can be directly administered or targeted to the required site in vivo using appropriate vectors, as described above. Alternatively, expression of non-altered genes can be increased using a similar method: targeted homologous recombination can be used to insert a DNA construct comprising a non-altered functional gene, or the complement thereof, or a portion thereof, in place of an gene in the cell, as described above. In another embodiment, targeted homologous recombination can be used to insert a DNA construct comprising a nucleic acid that encodes a polypeptide variant that differs from that present in the cell.

[0062] Alternatively, endogenous expression of a gene product can be reduced by targeting deoxyribonucleotide sequences complementary to the regulatory region (i.e., the promoter and/or enhancers) to form triple helical structures that prevent transcription of the gene in target cells in the body. (See generally, Helene, C., Anticancer Drug Des., 6 (6): 569-84 (1991); Helene, C. et al., Ann. N.Y. Acad. Sci. 660: 27-36 (1992); and Maher, L. J., Bioassays 14 (12): 807-15 (1992)). Likewise, the antisense constructs described herein, by antagonizing the normal biological activity of the gene product, can be used in the manipulation of tissue, e.g., tissue differentiation, both in vivo and for ex vivo tissue cultures. Furthermore, the anti-sense techniques (e.g., microinjection of antisense molecules, or transfection with plasmids whose transcripts are anti-sense with regard to a nucleic acid RNA or nucleic acid sequence) can be used to investigate the role of one or more members of the PDE4D pathway in the development of disease-related conditions. Such techniques can be utilized in cell culture, but can also be used in the creation of transgenic animals.

[0063] The therapeutic agents as described herein can be delivered in a composition, as described above, or alone. They can be administered systemically, or can be targeted to a particular tissue. The therapeutic agents can be produced by a variety of means, including chemical synthesis; recombinant production; in vivo production (e.g., a transgenic animal, such as U.S. Pat. No. 4,873,316 to Meade et al.), for example, and can be isolated using standard means such as those described herein. In addition, a combination of any of the above methods of treatment (e.g., administration of non-altered polypeptide in conjunction with antisense therapy targeting altered mRNA; administration of a first splicing variant in conjunction with antisense therapy targeting a second splicing variant) can also be used.

[0064] The invention additionally pertains to use of such therapeutic agents, as described herein, for the manufacture of a medicament for the treatment of stroke, TIA, MI, and/or atherosclerosis, e.g., using the methods described herein.

Monitoring Progress of Treatment

[0065] The current invention also pertains to methods of monitoring the effectiveness of treatment on the regulation of expression (e.g., relative or absolute expression) of one or more PDE4D isoforms at the RNA or protein level or its enzymatic activity. PDE4D message or protein or enzymatic activity can be measured in a sample of peripheral blood or cells derived therefrom. An assessment of the levels of expression or activity can be made before and during treatment with PDE4D therapeutic agents.

[0066] For example, in one embodiment of the invention, an individual who is a member of the target population can be assessed for response to treatment with a PDE4D inhibitor, by examining cAMP levels or PDE4D enzymatic activity or absolute and/or relative levels of PDE4D protein or mRNA isoforms in peripheral blood in general or specific cell subfractions or combination of cell subfractions. In addition, variation such as haplotypes or mutations within or near (within 100 to 200 kb) of the PDE4D gene may be used to identify individuals who are at higher risk for stroke or TIA to increase the power and efficiency of clinical trials for pharmaceutical agents to prevent or treat first or subsequent stroke. The haplotypes and other variations may be used to exclude or fractionate patients in a clinical trial who are likely to have non-cAMP or non-PDE4D pathway involvement in their stroke risk in order to enrich patients who have other pathways involved and boost the power and sensitivity of the clinical trial. Such variation may be used as a pharmacogenomic test to guide selection of pharmaceutical agents for individuals.

Nucleic Acids of the Invention

Nucleic Acids, Portions and Variants

[0067] All nucleotide positions are relative to SEQ ID NO: 1. The nucleic acids, polypeptides and antibodies described herein can be used in methods of diagnosis of susceptibility to stroke, as well as in kits useful for diagnosis of a susceptibility to stroke. In addition, the invention pertains to isolated nucleic acid molecules comprising a human PDE4D nucleic acid. The term, “PDE4D nucleic acid,” as used herein, refers to an isolated nucleic acid molecule encoding PDE4D polypeptide. The PDE4D nucleic acid molecules of the present invention can be RNA, for example, mRNA, or DNA, such as cDNA and genomic DNA. DNA molecules can be double-stranded or single-stranded; single stranded RNA or DNA can be either the coding, or sense strand or the non-coding, or antisense strand. The nucleic acid molecule can include all or a portion of the coding sequence of the gene or nucleic acid and can further comprise additional non-coding sequences such as introns and non-coding 3′ and 5′ sequences (including regulatory sequences, for example, as well as promoters, transcription enhancement elements, splice donor/acceptor sites, etc.). For example, a PDE4D nucleic acid can comprise the nucleic acid of SEQ ID NO: 1 which may optionally comprise at least one polymorphism as shown in Tables 11 and 12, the complement thereof, or to a portion or fragment of such an isolated nucleic acid molecule (e.g., cDNA or the nucleic acid) that encodes PDE4D polypeptide.

[0068] Additionally, the nucleic acid molecules of the invention can be fused to a marker sequence, for example, a sequence that encodes a polypeptide to assist in isolation or purification of the polypeptide. Such sequences include, but are not limited to, those that encode a glutathione-S-transferase (GST) fusion protein and those that encode a hemagglutinin A (HA) polypeptide marker from influenza.

[0069] An “isolated” nucleic acid molecule, as used herein, is one that is separated from nucleic acids that normally flank the gene or nucleotide sequence (as in genomic sequences) and/or has been completely or partially purified from other transcribed sequences (e.g., as in an RNA library). For example, an isolated nucleic acid of the invention may be substantially isolated with respect to the complex cellular milieu in which it naturally occurs, or culture medium when produced by recombinant techniques, or chemical precursors or other chemicals when chemically synthesized. In some instances, the isolated material will form part of a composition (for example, a crude extract containing other substances), buffer system or reagent mix. In other circumstances, the material may be purified to essential homogeneity, for example as determined by PAGE or column chromatography such as HPLC. Preferably, an isolated nucleic acid molecule comprises at least about 50, 80 or 90% (on a molar basis) of all macromolecular species present. With regard to genomic DNA, the term “isolated” also can refer to nucleic acid molecules that are separated from the chromosome with which the genomic DNA is naturally associated. For example, the isolated nucleic acid molecule can contain less than about 5 kb, 4 kb, 3 kb, 2 kb, 1 kb, 0.5 kb or 0.1 kb of nucleotides which flank the nucleic acid molecule in the genomic DNA of the cell from which the nucleic acid molecule is derived.

[0070] The nucleic acid molecule can be fused to other coding or regulatory sequences and still be considered isolated. Thus, recombinant DNA contained in a vector is included in the definition of “isolated” as used herein. Also, isolated nucleic acid molecules include recombinant DNA molecules in heterologous host cells, as well as partially or substantially purified DNA molecules in solution. “Isolated” nucleic acid molecules also encompass in vivo and in vitro RNA transcripts of the DNA molecules of the present invention. An isolated nucleic acid molecule or nucleotide sequence can include a nucleic acid molecule or nucleotide sequence that is synthesized chemically or by recombinant means. Therefore, recombinant DNA contained in a vector is included in the definition of “isolated” as used herein. Also, isolated nucleotide sequences include recombinant DNA molecules in heterologous organisms, as well as partially or substantially purified DNA molecules in solution. In vivo and in vitro RNA transcripts of the DNA molecules of the present invention are also encompassed by “isolated” nucleotide sequences. Such isolated nucleotide sequences are useful in the manufacture of the encoded polypeptide, as probes for isolating homologous sequences (e.g., from other mammalian species), for gene mapping (e.g., by in situ hybridization with chromosomes), or for detecting expression of the gene in tissue (e.g., human tissue), such as by Northern blot analysis.

[0071] The present invention also pertains to variant nucleic acid molecules which are not necessarily found in nature but which encode a PDE4D polypeptide (e.g., a polypeptide having the amino acid sequence of SEQ ID NO: 2, 3, 4, 5, 6, 7, 8, 9, 10, 12 or 14), or another splicing variant of PDE4D polypeptide or polymorphic variant thereof. Thus, for example, DNA molecules which comprise a sequence that is different from the naturally-occurring nucleotide sequence but which, due to the degeneracy of the genetic code, encode a PDE4D polypeptide of the present invention are also the subject of this invention. The invention also encompasses nucleotide sequences encoding portions (fragments), or encoding variant polypeptides such as analogues or derivatives of the PDE4D polypeptide. Such variants can be naturally-occurring, such as in the case of allelic variation or single nucleotide polymorphisms, or non-naturally-occurring, such as those induced by various mutagens and mutagenic processes. Intended variations include, but are not limited to, addition, deletion and substitution of one or more nucleotides that can result in conservative or non-conservative amino acid changes, including additions and deletions. Preferably the nucleotide (and/or resultant amino acid) changes are silent or conserved; that is, they do not alter the characteristics or activity of the PDE4D polypeptide. In one embodiment, the nucleotide sequences are fragments that comprise one or more polymorphic microsatellite markers. In another embodiment, the nucleotide sequences are fragments that comprise one or more single nucleotide polymorphisms in the PDE4D gene.

[0072] Other alterations of the nucleic acid molecules of the invention can include, for example, labeling, methylation, internucleotide modifications such as uncharged linkages (e.g., methyl phosphonates, phosphotriesters, phosphoamidates, carbamates), charged linkages (e.g., phosphorothioates, phosphorodithioates), pendent moieties (e.g., polypeptides), intercalators (e.g., acridine, psoralen), chelators, alkylators, and modified linkages (e.g., alpha anomeric nucleic acids). Also included are synthetic molecules that mimic nucleic acid molecules in the ability to bind to a designated sequence via hydrogen bonding and other chemical interactions. Such molecules include, for example, those in which peptide linkages substitute for phosphate linkages in the backbone of the molecule.

[0073] The invention also pertains to nucleic acid molecules that hybridize under high stringency hybridization conditions, such as for selective hybridization, to a nucleotide sequence described herein (e.g., nucleic acid molecules which specifically hybridize to a nucleotide sequence encoding polypeptides described herein, and, optionally, have an activity of the polypeptide). In one embodiment, the invention includes variants described herein which hybridize under high stringency hybridization conditions (e.g., for selective hybridization) to a nucleotide sequence comprising a nucleotide sequence selected from SEQ ID NO: 1 which may optionally comprise at least one polymorphism as shown in Tables 11 and 12 or the complement thereof. In another embodiment, the invention includes variants described herein which hybridize under high stringency hybridization conditions (e.g., for selective hybridization) to a nucleotide sequence encoding an amino acid sequence selected from SEQ ID NO: 2, 3, 4, 5, 6, 7, 8, 9, 10, 12 or 14 or polymorphic variant thereof. In another embodiment, the protein product of the variant that hybridizes under high stringency conditions has an activity of PDE4D.

[0074] Such nucleic acid molecules can be detected and/or isolated by specific hybridization (e.g., under high stringency conditions). “Specific hybridization,” as used herein, refers to the ability of a first nucleic acid to hybridize to a second nucleic acid in a manner such that the first nucleic acid does not hybridize to any nucleic acid other than to the second nucleic acid (e.g., when the first nucleic acid has a higher similarity to the second nucleic acid than to any other nucleic acid in a sample wherein the hybridization is to be performed). “Stringency conditions” for hybridization is a term of art which refers to the incubation and wash conditions, e.g., conditions of temperature and buffer concentration, which permit hybridization of a particular nucleic acid to a second nucleic acid; the first nucleic acid may be perfectly (i.e., 100%) complementary to the second, or the first and second may share some degree of complementarity which is less than perfect (e.g., 70%, 75%, 85%, 95%). For example, certain high stringency conditions can be used which distinguish perfectly complementary nucleic acids from those of less complementarity. “High stringency conditions”, “moderate stringency conditions” and “low stringency conditions” for nucleic acid hybridizations are explained on pages 2.10.1-2.10.16 and pages 6.3.1-6.3.6 in Current Protocols in Molecular Biology (Ausubel, F. M. et al., “Current Protocols in Molecular Biology”, John Wiley & Sons, (1998), the entire teachings of which are incorporated by reference herein). The exact conditions which determine the stringency of hybridization depend not only on ionic strength (e.g., 0.2×SSC, 0.1×SSC), temperature (e.g., room temperature, 42° C., 68° C.) and the concentration of destabilizing agents such as formamide or denaturing agents such as SDS, but also on factors such as the length of the nucleic acid sequence, base composition, percent mismatch between hybridizing sequences and the frequency of occurrence of subsets of that sequence within other non-identical sequences. Thus, equivalent conditions can be determined by varying one or more of these parameters while maintaining a similar degree of identity or similarity between the two nucleic acid molecules. Typically, conditions are used such that sequences at least about 60%, at least about 70%, at least about 80%, at least about 90% or at least about 95% or more identical to each other remain hybridized to one another. By varying hybridization conditions from a level of stringency at which no hybridization occurs to a level at which hybridization is first observed, conditions which will allow a given sequence to hybridize (e.g., selectively) with the most similar sequences in the sample can be determined.

[0075] Exemplary conditions are described in Krause, M. H. and S. A. Aaronson, Methods in Enzymology, 200: 546-556 (1991). Also, in, Ausubel, et al., “Current Protocols in Molecular Biology”, John Wiley & Sons, (1998), which describes the determination of washing conditions for moderate or low stringency conditions. Washing is the step in which conditions are usually set so as to determine a minimum level of complementarity of the hybrids. Generally, starting from the lowest temperature at which only homologous hybridization occurs, each ° C. by which the final wash temperature is reduced (holding SSC concentration constant) allows an increase by 1% in the maximum extent of mismatching among the sequences that hybridize. Generally, doubling the concentration of SSC results in an increase in Tₘ of ˜17° C. Using these guidelines, the washing temperature can be determined empirically for high, moderate or low stringency, depending on the level of mismatch sought.

[0076] For example, a low stringency wash can comprise washing in a solution containing 0.2×SSC/0.1% SDS for 10 min at room temperature; a moderate stringency wash can comprise washing in a prewarmed solution (42° C.) solution containing 0.2×SSC/0.1% SDS for 15 min at 42° C.; and a high stringency wash can comprise washing in prewarmed (68° C.) solution containing 0.1×SSC/0.1% SDS for 15 min at 68° C. Furthermore, washes can be performed repeatedly or sequentially to obtain a desired result as known in the art. Equivalent conditions can be determined by varying one or more of the parameters given as an example, as known in the art, while maintaining a similar degree of identity or similarity between the target nucleic acid molecule and the primer or probe used.

[0077] The percent homology or identity of two nucleotide or amino acid sequences can be determined by aligning the sequences for optimal comparison purposes (e.g., gaps can be introduced in the sequence of a first sequence for optimal alignment). The nucleotides or amino acids at corresponding positions are then compared, and the percent identity between the two sequences is a function of the number of identical positions shared by the sequences (i.e., % identity=# of identical positions/total # of positions×100). When a position in one sequence is occupied by the same nucleotide amino acid residue as the corresponding position in the other sequence, then the molecules are homologous at that position. As used herein, nucleic acid or amino acid “homology” is equivalent to nucleic acid or amino acid “identity”. In certain embodiments, the length of a sequence aligned for comparison purposes is at least 30%, for example, at least 40%, in certain embodiments at least 60%, and in other embodiments at least 70%, 80%, 90% or 95% of the length of the reference sequence. The actual comparison of the two sequences can be accomplished by well-known methods, for example, using a mathematical algorithm. One, non-limiting example of such a mathematical algorithm is described in Karlin et al., Proc. Natl. Acad. Sci. USA 90: 5873-5877 (1993). Such an algorithm is incorporated into the NBLAST and XBLAST programs (version 2.0) as described in Altschul et al., Nucleic Acids Res. 25: 389-3402 (1997). When utilizing BLAST and Gapped BLAST programs, the default parameters of the respective programs (e.g., NBLAST) can be used. In one embodiment, parameters for sequence comparison can be set at score=100, wordlength=12, or can be varied (e.g., W=5 or W=20).

[0078] Another preferred non-limiting example of a mathematical algorithm utilized for the comparison of sequences is the algorithm of Myers and Miller, CABIOS (1989). Such an algorithm is incorporated into the ALIGN program (version 2.0) which is part of the GCG sequence alignment software package. When utilizing the ALIGN program for comparing amino acid sequences, a PAM120 weight residue table, a gap length penalty of 12, and a gap penalty of 4 can be used. Additional algorithms for sequence analysis are known in the art and include ADVANCE and ADAM as described in Torellis and Robotti (1994) Comput. Appl. Biosci., 10: 3-5; and FASTA described in Pearson and Lipman (1988) PNAS, 85: 2444-8.

[0079] In another embodiment, the percent identity between two amino acid sequences can be accomplished using the GAP program in the GCG software package (Accelrys, Cambridge, UK) using either a Blossom 63 matrix or a PAM250 matrix, and a gap weight of 12, 10, 8, 6, or 4 and a length weight of 2, 3, or 4. In yet another embodiment, the percent identity between two nucleic acid sequences can be accomplished using the GAP program in the GCG software package, using a gap weight of 50 and a length weight of 3.

[0080] The present invention also provides isolated nucleic acid molecules that contain a fragment or portion that hybridizes under highly stringent conditions to a nucleotide sequence comprising a nucleotide sequence selected from SEQ ID NO: 1 which may optionally comprise at least one polymorphism as shown in Tables 11 and 12 and the complement thereof, and also provides isolated nucleic acid molecules that contain a fragment or portion that hybridizes under highly stringent conditions to a nucleotide sequence encoding an amino acid sequence selected from SEQ ID NO: 2, 3, 4, 5, 6, 7, 8, 9, 10, 12 or 14, or polymorphic variant thereof. The nucleic acid fragments of the invention are at least about 15, preferably at least about 18, 20, 23 or 25 nucleotides, and can be 30, 40, 50, 100, 200 or more nucleotides in length. Longer fragments, for example, 30 or more nucleotides in length, which encode antigenic polypeptides described herein are particularly useful, such as for the generation of antibodies as described below.

Probes and Primers

[0081] In a related aspect, the nucleic acid fragments of the invention are used as probes or primers in assays such as those described herein. “Probes” or “primers” are oligonucleotides that hybridize in a base-specific manner to a complementary strand of nucleic acid molecules. By “base specific manner” is meant that the two sequences must have a degree of nucleotide complementarity sufficient for the primer or probe to hybridize. Accordingly, the primer or probe sequence is not required to be perfectly complementary to the sequence of the template. Non-complementary bases or modified bases can be interspersed into the primer or probe, provided that base substitutions do not inhibit hybridization. The nucleic acid template may also include “non-specific priming sequences” or “nonspecific sequences” to which the primer or probe has varying degrees of complementarities. Such probes and primers include polypeptide nucleic acids, as described in Nielsen et al., Science, 254, 1497-1500 (1991).

[0082] A probe or primer comprises a region of nucleic acid that hybridizes to at least about 15, for example about 20-25, and in certain embodiments about 40, 50 or 75, consecutive nucleotides of a nucleic acid of the invention, such as a nucleic acid comprising a contiguous nucleic acid sequence of SEQ ID NO: 1 or the complement of SEQ ID NO: 1, or a nucleic acid sequence encoding an amino acid sequence of SEQ ID NO: 2, 3, 4, 5, 6, 7, 8, 9, 10, 12 or 14, or polymorphic variant thereof. In certain embodiments, a probe or primer comprises 100 or fewer nucleotides, in certain embodiments, from 6 to 50 nucleotides, for example, from 12 to 30 nucleotides. In other embodiments, the probe or primer is at least 70% identical to the contiguous nucleic acid sequence or to the complement of the contiguous nucleotide sequence, for example, at least 80% identical, in certain embodiments at least 90% identical, and in other embodiments at least 95% identical, or even capable of selectively hybridizing to the contiguous nucleic acid sequence or to the complement of the contiguous nucleotide sequence. Often, the probe or primer further comprises a label, e.g., radioisotope, fluorescent compound, enzyme, or enzyme co-factor.

[0083] The nucleic acid molecules of the invention such as those described above can be identified and isolated using standard molecular biology techniques and the sequence information provided herein. For example, nucleic acid molecules can be amplified and isolated by the polymerase chain reaction using synthetic oligonucleotide primers designed based on one or more of the sequences provided in SEQ ID NO: 1 which may optionally comprise at least one polymorphism shown in Tables 11 and 12, and/or the complement thereof, or designed based on nucleotides based on sequences encoding one or more of the amino acid sequences provided herein. See generally PCR Technology: Principles and Applications for DNA Amplification (ed. H. A. Erlich, Freeman Press, NY, N.Y., 1992); PCR Protocols: A Guide to Methods and Applications (Eds. Innis, et al., Academic Press, San Diego, Calif., 1990); Mattila et al., Nucleic Acids Res., 19: 4967 (1991); Eckert et al., PCR Methods and Applications, 1: 17 (1991); PCR (eds. McPherson et al., IRL Press, Oxford); and U.S. Pat. No. 4,683,202. The nucleic acid molecules can be amplified using cDNA, mRNA or genomic DNA as a template, cloned into an appropriate vector and characterized by DNA sequence analysis.

[0084] Other suitable amplification methods include the ligase chain reaction (LCR) (see Wu and Wallace, Genomics, 4: 560 (1989), Landegren et al., Science, 241: 1077 (1988), transcription amplification (Kwoh et al., Proc. Natl. Acad. Sci. USA, 86: 1173 (1989)), and self-sustained sequence replication (Guatelli et al., Proc. Nat. Acad. Sci. USA, 87: 1874 (1990)) and nucleic acid based sequence amplification (NASBA). The latter two amplification methods involve isothermal reactions based on isothermal transcription, which produce both single stranded RNA (ssRNA) and double stranded DNA (dsDNA) as the amplification products in a ratio of about 30 or 100 to 1, respectively.

[0085] The amplified DNA can be labeled (e.g., with radiolabel or other reporter molecule) and used as a probe for screening a cDNA library derived from human cells, mRNA in zap express, ZIPLOX or other suitable vector. Corresponding clones can be isolated, DNA can obtained following in vivo excision, and the cloned insert can be sequenced in either or both orientations by art recognized methods to identify the correct reading frame encoding a polypeptide of the appropriate molecular weight. For example, the direct analysis of the nucleotide sequence of nucleic acid molecules of the present invention can be accomplished using well-known methods that are commercially available. See, for example, Sambrook et al., Molecular Cloning, A Laboratory Manual (2nd Ed., CSHP, New York 1989); Zyskind et al., Recombinant DNA Laboratory Manual, (Acad. Press, 1988)). Using these or similar methods, the polypeptide and the DNA encoding the polypeptide can be isolated, sequenced and further characterized.

[0086] Antisense nucleic acid molecules of the invention can be designed using the nucleotide sequences of SEQ ID NO: 1 and/or the complement of SEQ ID NO: 1, and/or a portion of SEQ ID NO: 1 or the complement of SEQ ID NO: 1 and/or a sequence encoding the amino acid sequences or SEQ ID NO: 2, 3, 4, 5, 6, 7, 8, 9, 10, 12 and/or 14, or encoding a portion of SEQ ID NO: 2, 3, 4, 5, 6, 7, 8, 9, 10, 12 and/or 14, (wherein any one of these may optionally comprise at least one polymorphism as shown in Tables 11 and 12) and constructed using chemical synthesis and enzymatic ligation reactions using procedures known in the art. For example, an antisense nucleic acid molecule (e.g., an antisense oligonucleotide) can be chemically synthesized using naturally occurring nucleotides or variously modified nucleotides designed to increase the biological stability of the molecules or to increase the physical stability of the duplex formed between the antisense and sense nucleic acids, e.g., phosphorothioate derivatives and acridine substituted nucleotides can be used. Alternatively, the antisense nucleic acid molecule can be produced biologically using an expression vector into which a nucleic acid molecule has been subcloned in an antisense orientation (i.e., RNA transcribed from the inserted nucleic acid molecule will be of an antisense orientation to a target nucleic acid of interest).

[0087] In general, the isolated nucleic acid sequences of the invention can be used as molecular weight markers on Southern gels, and as chromosome markers that are labeled to map related gene positions. The nucleic acid sequences can also be used to compare with endogenous DNA sequences in patients to identify genetic disorders (e.g., a predisposition for or susceptibility to stroke), and as probes, such as to hybridize and discover related DNA sequences or to subtract out known sequences from a sample. The nucleic acid sequences can further be used to derive primers for genetic fingerprinting, to raise anti-polypeptide antibodies using DNA immunization techniques, and as an antigen to raise anti-DNA antibodies or elicit immune responses. Portions or fragments of the nucleotide sequences identified herein (and the corresponding complete gene sequences) can be used in numerous ways as polynucleotide reagents. For example, these sequences can be used to: (i) map their respective genes on a chromosome; and, thus, locate gene regions associated with genetic disease; (ii) identify an individual from a minute biological sample (tissue typing); and (iii) aid in forensic identification of a biological sample. Additionally, the nucleotide sequences of the invention can be used to identify and express recombinant polypeptides for analysis, characterization or therapeutic use, or as markers for tissues in which the corresponding polypeptide is expressed, either constitutively, during tissue differentiation, or in diseased states. The nucleic acid sequences can additionally be used as reagents in the screening and/or diagnostic assays described herein, and can also be included as components of kits (e.g., reagent kits) for use in the screening and/or diagnostic assays described herein.

Vectors

[0088] Another aspect of the invention pertains to nucleic acid constructs containing a nucleic acid molecule selected from the group consisting of SEQ ID NO: 1 which may optionally comprise at least one polymorphism shown in Tables 11 and 12 and the complement thereof (or a portion thereof). Yet another aspect of the invention pertains to nucleic acid constructs containing a nucleic acid molecule encoding the amino acid sequence of SEQ ID NO: 2, 3, 4, 5, 6, 7, 8, 9, 10, 12 or 14 or polymorphic variant thereof. The constructs comprise a vector (e.g., an expression vector) into which a sequence of the invention has been inserted in a sense or antisense orientation. As used herein, the term “vector” refers to a nucleic acid molecule capable of transporting another nucleic acid to which it has been linked. One type of vector is a “plasmid”, which refers to a circular double stranded DNA loop into which additional DNA segments can be ligated. Another type of vector is a viral vector, wherein additional DNA segments can be ligated into the viral genome. Certain vectors are capable of autonomous replication in a host cell into which they are introduced (e.g., bacterial vectors having a bacterial origin of replication and episomal mammalian vectors). Other vectors (e.g., non-episomal mammalian vectors) are integrated into the genome of a host cell upon introduction into the host cell, and thereby are replicated along with the host genome. Moreover, certain vectors, expression vectors, are capable of directing the expression of genes to which they are operably linked. In general, expression vectors of utility in recombinant DNA techniques are often in the form of plasmids. However, the invention is intended to include such other forms of expression vectors, such as viral vectors (e.g., replication defective retroviruses, adenoviruses and adeno-associated viruses) that serve equivalent functions.

[0089] Preferred recombinant expression vectors of the invention comprise a nucleic acid molecule of the invention in a form suitable for expression of the nucleic acid molecule in a host cell. This means that the recombinant expression vectors include one or more regulatory sequences, selected on the basis of the host cells to be used for expression, which is operably linked to the nucleic acid sequence to be expressed. Within a recombinant expression vector, “operably or operatively linked” is intended to mean that the nucleotide sequence of interest is linked to the regulatory sequence(s) in a manner which allows for expression of the nucleotide sequence (e.g., in an in vitro transcription/translation system or in a host cell when the vector is introduced into the host cell). The term “regulatory sequence” is intended to include promoters, enhancers and other expression control elements (e.g., polyadenylation signals). Such regulatory sequences are described, for example, in Goeddel, Gene Expression Technology: Methods in Enzymology 185, Academic Press, San Diego, Calif. (1990). Regulatory sequences include those which direct constitutive expression of a nucleotide sequence in many types of host cell and those which direct expression of the nucleotide sequence only in certain host cells (e.g., tissue-specific regulatory sequences). It will be appreciated by those skilled in the art that the design of the expression vector can depend on such factors as the choice of the host cell to be transformed and the level of expression of polypeptide desired. The expression vectors of the invention can be introduced into host cells to thereby produce polypeptides, including fusion polypeptides, encoded by nucleic acid molecules as described herein.

[0090] The recombinant expression vectors of the invention can be designed for expression of a polypeptide of the invention in prokaryotic or eukaryotic cells, e.g., bacterial cells such as E. coli, insect cells (using baculovirus expression vectors), yeast cells or mammalian cells. Suitable host cells are discussed further in Goeddel, supra. Alternatively, the recombinant expression vector can be transcribed and translated in vitro, for example using T7 promoter regulatory sequences and T7 polymerase.

[0091] Another aspect of the invention pertains to host cells into which a recombinant expression vector of the invention has been introduced. The terms “host cell” and “recombinant host cell” are used interchangeably herein. It is understood that such terms refer not only to the particular subject cell but also to the progeny or potential progeny of such a cell. Because certain modifications may occur in succeeding generations due to either mutation or environmental influences, such progeny may not, in fact, be identical to the parent cell, but are still included within the scope of the term as used herein.

[0092] A host cell can be any prokaryotic or eukaryotic cell. For example, a nucleic acid molecule of the invention can be expressed in bacterial cells (e.g., E. coli), insect cells, yeast or mammalian cells (such as Chinese hamster ovary cells (CHO) or COS cells). Other suitable host cells are known to those skilled in the art.

[0093] Vector DNA can be introduced into prokaryotic or eukaryotic cells via conventional transformation or transfection techniques. As used herein, the terms “transformation” and “transfection” are intended to refer to a variety of art-recognized techniques for introducing a foreign nucleic acid molecule (e.g., DNA) into a host cell, including calcium phosphate or calcium chloride co-precipitation, DEAE-dextran-mediated transfection, lipofection, or electroporation. Suitable methods for transforming or transfecting host cells can be found in Sambrook, et al., (supra), and other laboratory manuals.

[0094] For stable transfection of mammalian cells, it is known that, depending upon the expression vector and transfection technique used, only a small fraction of cells may integrate the foreign DNA into their genome. In order to identify and select these integrants, a gene that encodes a selectable marker (e.g., for resistance to antibiotics) is generally introduced into the host cells along with the gene of interest. Preferred selectable markers include those that confer resistance to drugs, such as G418, hygromycin and methotrexate. Nucleic acid molecules encoding a selectable marker can be introduced into a host cell on the same vector as the nucleic acid molecule of the invention or can be introduced on a separate vector. Cells stably transfected with the introduced nucleic acid molecule can be identified by drug selection (e.g., cells that have incorporated the selectable marker gene will survive, while the other cells die).

[0095] A host cell of the invention, such as a prokaryotic or eukaryotic host cell in culture, can be used to produce (i.e., express) a polypeptide of the invention. Accordingly, the invention further provides methods for producing a polypeptide using the host cells of the invention. In one embodiment, the method comprises culturing the host cell of invention (into which a recombinant expression vector encoding a polypeptide of the invention has been introduced) in a suitable medium such that the polypeptide is produced. In another embodiment, the method further comprises isolating the polypeptide from the medium or the host cell.

[0096] The host cells of the invention can also be used to produce nonhuman transgenic animals. For example, in one embodiment, a host cell of the invention is a fertilized oocyte or an embryonic stem cell into which a nucleic acid molecule of the invention has been introduced (e.g., an exogenous PDE4D gene, or an exogenous nucleic acid encoding PDE4D polypeptide). Such host cells can then be used to create non-human transgenic animals in which exogenous nucleotide sequences have been introduced into the genome or homologous recombinant animals in which endogenous nucleotide sequences have been altered. Such animals are useful for studying the function and/or activity of the nucleotide sequence and polypeptide encoded by the sequence and for identifying and/or evaluating modulators of their activity. As used herein, a “transgenic animal” is a non-human animal, preferably a mammal, more preferably a rodent such as a rat or mouse, in which one or more of the cells of the animal include a transgene. Other examples of transgenic animals include non-human primates, sheep, dogs, cows, goats, chickens and amphibians. A transgene is exogenous DNA which is integrated into the genome of a cell from which a transgenic animal develops and which remains in the genome of the mature animal, thereby directing the expression of an encoded gene product in one or more cell types or tissues of the transgenic animal. As used herein, an “homologous recombinant animal” is a non-human animal, preferably a mammal, more preferably a mouse, in which an endogenous gene has been altered by homologous recombination between the endogenous gene and an exogenous DNA molecule introduced into a cell of the animal, e.g., an embryonic cell of the animal, prior to development of the animal.

[0097] Methods for generating transgenic animals via embryo manipulation and microinjection, particularly animals such as mice, have become conventional in the art and are described, for example, in U.S. Pat. Nos. 4,736,866 and 4,870,009, U.S. Pat. No. 4,873,191 and in Hogan, Manipulating the Mouse Embryo (Cold Spring Harbor Laboratory Press, Cold Spring Harbor, N.Y., 1986). Methods for constructing homologous recombination vectors and homologous recombinant animals are described further in Bradley (1991) Current Opinion in Bio/Technology, 2: 823-829 and in PCT Publication Nos. WO 90/11354, WO 91/01140, WO 92/0968, and WO 93/04169. Clones of the non-human transgenic animals described herein can also be produced according to the methods described in Wilmut et al. (1997) Nature, 385: 810-813 and PCT Publication Nos. WO 97/07668 and WO 97/07669.

Polypeptides of the Invention

[0098] The present invention also pertains to isolated polypeptides encoded by PDE4D (“PDE4D polypeptides”) and fragments and variants thereof, as well as polypeptides encoded by nucleotide sequences described herein (e.g., other splicing variants). The term “polypeptide” refers to a polymer of amino acids, and not to a specific length; thus, peptides, oligopeptides and proteins are included within the definition of a polypeptide. As used herein, a polypeptide is said to be “isolated” or “purified” when it is substantially free of cellular material when it is isolated from recombinant and non-recombinant cells, or free of chemical precursors or other chemicals when it is chemically synthesized. A polypeptide, however, can be joined to another polypeptide with which it is not normally associated in a cell (e.g., in a “fusion protein”) and still be “isolated” or “purified.”

[0099] The polypeptides of the invention can be purified to homogeneity. It is understood, however, that preparations in which the polypeptide is not purified to homogeneity are useful. The critical feature is that the preparation allows for the desired function of the polypeptide, even in the presence of considerable amounts of other components. Thus, the invention encompasses various degrees of purity. In one embodiment, the language “substantially free of cellular material” includes preparations of the polypeptide having less than about 30% (by dry weight) other proteins (i.e., contaminating protein), less than about 20% other proteins, less than about 10% other proteins, or less than about 5% other proteins.

[0100] When a polypeptide is recombinantly produced, it can also be substantially free of culture medium, i.e., culture medium represents less than about 20%, less than about 10%, or less than about 5% of the volume of the polypeptide preparation. The language “substantially free of chemical precursors or other chemicals” includes preparations of the polypeptide in which it is separated from chemical precursors or other chemicals that are involved in its synthesis. In one embodiment, the language “substantially free of chemical precursors or other chemicals” includes preparations of the polypeptide having less than about 30% (by dry weight) chemical precursors or other chemicals, less than about 20% chemical precursors or other chemicals, less than about 10% chemical precursors or other chemicals, or less than about 5% chemical precursors or other chemicals.

[0101] In one embodiment, a polypeptide of the invention comprises an amino acid sequence encoded by a nucleic acid molecule comprising a nucleotide sequence selected from the group consisting of SEQ ID NO: 1 which may optionally comprise at least one polymorphism shown in Tables 11 and 12 and complements and portions thereof, e.g., SEQ ID NO: 2, 3, 4, 5, 6, 7, 8, 9, 10, 12 or 14, or a portion or polymorphic variant thereof. However, the polypeptides of the invention also encompass fragment and sequence variants. Variants include a substantially homologous polypeptide encoded by the same genetic locus in an organism, i.e., an allelic variant, as well as other splicing variants. Variants also encompass polypeptides derived from other genetic loci in an organism, but having substantial homology to a polypeptide encoded by a nucleic acid molecule comprising a nucleotide sequence selected from the group consisting of SEQ ID NO: 1 which may optionally comprise at least one polymorphism shown in Tables 11 and 12 and complements and portions thereof, or having substantial homology to a polypeptide encoded by a nucleic acid molecule comprising a nucleotide sequence selected from the group consisting of nucleotide sequences encoding SEQ ID NO: 2, 3, 4, 5, 6, 7, 8, 9, 10, 12 or 14, or polymorphic variants thereof. Variants also include polypeptides substantially homologous or identical to these polypeptides but derived from another organism, i.e., an ortholog. Variants also include polypeptides that are substantially homologous or identical to these polypeptides that are produced by chemical synthesis. Variants also include polypeptides that are substantially homologous or identical to these polypeptides that are produced by recombinant methods.

[0102] As used herein, two polypeptides (or a region of the polypeptides) are substantially homologous or identical when the amino acid sequences are at least about 45-55%, in certain embodiments at least about 70-75%, and in other embodiments at least about 80-85%, and in others greater than about 90% or more homologous or identical. A substantially homologous amino acid sequence, according to the present invention, will be encoded by a nucleic acid molecule hybridizing to SEQ ID NO: 1 which may optionally comprise at least one polymorphism shown in Tables 11 and 12, or portion thereof, under stringent conditions as more particularly described above, or will be encoded by a nucleic acid molecule hybridizing to a nucleic acid sequence encoding SEQ ID NO: 2, 3, 4, 5, 6, 7, 8, 9, 10, 12 or 14, portion thereof or polymorphic variant thereof, under stringent conditions as more particularly described thereof.

[0103] The invention also encompasses polypeptides having a lower degree of identity but having sufficient similarity so as to perform one or more of the same functions performed by a polypeptide encoded by a nucleic acid molecule of the invention. Similarity is determined by conserved amino acid substitution. Such substitutions are those that substitute a given amino acid in a polypeptide by another amino acid of like characteristics. Conservative substitutions are likely to be phenotypically silent. Typically seen as conservative substitutions are the replacements, one for another, among the aliphatic amino acids Ala, Val, Leu and Ile; interchange of the hydroxyl residues Ser and Thr, exchange of the acidic residues Asp and Glu, substitution between the amide residues Asn and Gln, exchange of the basic residues Lys and Arg and replacements among the aromatic residues Phe and Tyr. Guidance concerning which amino acid changes are likely to be phenotypically silent are found in Bowie et al., Science 247: 1306-1310 (1990).

[0104] A variant polypeptide can differ in amino acid sequence by one or more substitutions, deletions, insertions, inversions, fusions, and truncations or a combination of any of these. Further, variant polypeptides can be fully functional or can lack function in one or more activities. Fully functional variants typically contain only conservative variation or variation in non-critical residues or in non-critical regions. Functional variants can also contain substitution of similar amino acids that result in no change or an insignificant change in function. Alternatively, such substitutions may positively or negatively affect function to some degree. Non-functional variants typically contain one or more non-conservative amino acid substitutions, deletions, insertions, inversions, or truncation or a substitution; insertion, inversion, or deletion in a critical residue or critical region.

[0105] Amino acids that are essential for function can be identified by methods known in the art, such as site-directed mutagenesis or alanine-scanning mutagenesis (Cunningham et al., Science, 244: 1081-1085 (1989)). The latter procedure introduces single alanine mutations at every residue in the molecule. The resulting mutant molecules are then tested for biological activity in vitro, or in vitro proliferative activity. Sites that are critical for polypeptide activity can also be determined by structural analysis such as crystallization, nuclear magnetic resonance or photoaffinity labeling (Smith et al., J. Mol. Biol., 224: 899-904 (1992); de Vos et al., Science, 255: 306-312 (1992)).

[0106] The invention also includes polypeptide fragments of the polypeptides of the invention. Fragments can be derived from a polypeptide encoded by a nucleic acid molecule comprising SEQ ID NO: 1 which may optionally comprise at least one polymorphism shown in Tables 11 and 12 or a portion thereof and the complements thereof (e.g., SEQ ID NO: 2, 3, 4, 5, 6, 7, 8, 9, 10, 12 or 14, or other splicing variants). However, the invention also encompasses fragments of the variants of the polypeptides described herein. As used herein, a fragment comprises at least 6 contiguous amino acids. Useful fragments include those that retain one or more of the biological activities of the polypeptide as well as fragments that can be used as an immunogen to generate polypeptide-specific antibodies.

[0107] Biologically active fragments (peptides which are, for example, 6, 9, 12, 15, 16, 20, 30, 35, 36, 37, 38, 39, 40, 50, 100 or more amino acids in length) can comprise a domain, segment, or motif that has been identified by analysis of the polypeptide sequence using well-known methods, e.g., signal peptides, extracellular domains, one or more transmembrane segments or loops, ligand binding regions, zinc finger domains, DNA binding domains, acylation sites, glycosylation sites, or phosphorylation sites.

[0108] Fragments can be discrete (not fused to other amino acids or polypeptides) or can be within a larger polypeptide. Further, several fragments can be comprised within a single larger polypeptide. In one embodiment a fragment designed for expression in a host can have heterologous pre- and pro-polypeptide regions fused to the amino terminus of the polypeptide fragment and an additional region fused to the carboxyl terminus of the fragment.

[0109] The invention thus provides chimeric or fusion polypeptides. These comprise a polypeptide of the invention operatively linked to a heterologous protein or polypeptide having an amino acid sequence not substantially homologous to the polypeptide. “Operatively linked” indicates that the polypeptide and the heterologous protein are fused in-frame. The heterologous protein can be fused to the N-terminus or C-terminus of the polypeptide. In one embodiment the fusion polypeptide does not affect function of the polypeptide per se. For example, the fusion polypeptide can be a GST-fusion polypeptide in which the polypeptide sequences are fused to the C-terminus of the GST sequences. Other types of fusion polypeptides include, but are not limited to, enzymatic fusion polypeptides, for example β-galactosidase fusions, yeast two-hybrid GAL fusions, poly-His fusions and Ig fusions. Such fusion polypeptides, particularly poly-His fusions, can facilitate the purification of recombinant polypeptide. In certain host cells (e.g., mammalian host cells), expression and/or secretion of a polypeptide can be increased by using a heterologous signal sequence. Therefore, in another embodiment, the fusion polypeptide contains a heterologous signal sequence at its N-terminus.

[0110] EP-A-O 464 533 discloses fusion proteins comprising various portions of immunoglobulin constant regions. The Fc is useful in therapy and diagnosis and thus results, for example, in improved pharmacokinetic properties (EP-A 0232 262). In drug discovery, for example, human proteins have been fused with Fc portions for the purpose of high-throughput screening assays to identify antagonists. Bennett et al., Journal of Molecular Recognition, 8: 52-58 (1995) and Johanson et al., The Journal of Biological Chemistry, 270, 16: 9459-9471 (1995). Thus, this invention also encompasses soluble fusion polypeptides containing a polypeptide of the invention and various portions of the constant regions of heavy or light chains of immunoglobulins of various subclasses (IgG, IgM, IgA, IgE).

[0111] A chimeric or fusion polypeptide can be produced by standard recombinant DNA techniques. For example, DNA fragments coding for the different polypeptide sequences are ligated together in-frame in accordance with conventional techniques. In another embodiment, the fusion gene can be synthesized by conventional techniques including automated DNA synthesizers. Alternatively, PCR amplification of nucleic acid fragments can be carried out using anchor primers which give rise to complementary overhangs between two consecutive nucleic acid fragments which can subsequently be annealed and re-amplified to generate a chimeric nucleic acid sequence (see Ausubel et al., Current Protocols in Molecular Biology, 1992). Moreover, many expression vectors are commercially available that already encode a fusion moiety (e.g., a GST protein). A nucleic acid molecule encoding a polypeptide of the invention can be cloned into such an expression vector such that the fusion moiety is linked in-frame to the polypeptide.

[0112] The isolated polypeptide can be purified from cells that naturally express it, purified from cells that have been altered to express it (recombinant), or synthesized using known protein synthesis methods. In one embodiment, the polypeptide is produced by recombinant DNA techniques. For example, a nucleic acid molecule encoding the polypeptide is cloned into an expression vector, the expression vector introduced into a host cell and the polypeptide expressed in the host cell. The polypeptide can then be isolated from the cells by an appropriate purification scheme using standard protein purification techniques.

[0113] In general, polypeptides of the present invention can be used as a molecular weight marker on SDS-PAGE gels or on molecular sieve gel filtration columns using art-recognized methods. The polypeptides of the present invention can be used to raise antibodies or to elicit an immune response. The polypeptides can also be used as a reagent, e.g., a labeled reagent, in assays to quantitatively determine levels of the polypeptide or a molecule to which it binds (e.g., a receptor or a ligand) in biological fluids. The polypeptides can also be used as markers for cells or tissues in which the corresponding polypeptide is preferentially expressed, either constitutively, during tissue differentiation, or in a diseased state. The polypeptides can be used to isolate a corresponding binding agent, e.g., receptor or ligand, such as, for example, in an interaction trap assay, and to screen for peptide or small molecule antagonists or agonists of the binding interaction.

Antibodies of the Invention

[0114] Polyclonal and/or monoclonal antibodies that specifically bind one form of the gene product but not to the other form of the gene product are also provided. Antibodies are also provided that bind a portion of either the variant or the reference gene product that contains the polymorphic site or sites. The invention provides antibodies to the polypeptides and polypeptide fragments of the invention, e.g., having an amino acid sequence encoded by SEQ ID NO: 2, 3, 4, 5, 6, 7, 8, 9, 10, 12 or 14, or a portion thereof, or having an amino acid sequence encoded by a nucleic acid molecule comprising all or a portion of SEQ ID NO: 1 which may optionally comprise at least one polymorphism shown in Tables 11 and 12 (e.g., SEQ ID NO: 2, 3, 4, 5, 6, 7, 8, 9, 10, 12 or 14, or another splicing variant or portion thereof). The term “antibody” as used herein refers to immunoglobulin molecules and immunologically active portions of immunoglobulin molecules, i.e., molecules that contain an antigen binding site that specifically binds an antigen. A molecule that specifically binds to a polypeptide of the invention is a molecule that binds to that polypeptide or a fragment thereof, but does not substantially bind other molecules in a sample, e.g., a biological sample, which naturally contains the polypeptide. Examples of immunologically active portions of immunoglobulin molecules include F(ab) and F(ab′)₂ fragments which can be generated by treating the antibody with an enzyme such as pepsin. The invention provides polyclonal and monoclonal antibodies that bind to a polypeptide of the invention. The term “monoclonal antibody” or “monoclonal antibody composition”, as used herein, refers to a population of antibody molecules that contain only one species of an antigen binding site capable of immunoreacting with a particular epitope of a polypeptide of the invention. A monoclonal antibody composition thus typically displays a single binding affinity for a particular polypeptide of the invention with which it immunoreacts.

[0115] Polyclonal antibodies can be prepared as described above by immunizing a suitable subject with a desired immunogen, e.g., polypeptide of the invention or fragment thereof. The antibody titer in the immunized subject can be monitored over time by standard techniques, such as with an enzyme linked immunosorbent assay (ELISA) using immobilized polypeptide. If desired, the antibody molecules directed against the polypeptide can be isolated from the mammal (e.g., from the blood) and further purified by well-known techniques, such as protein A chromatography to obtain the IgG fraction. At an appropriate time after immunization, e.g., when the antibody titers are highest, antibody-producing cells can be obtained from the subject and used to prepare monoclonal antibodies by standard techniques, such as the hybridoma technique originally described by Kohler and Milstein (1975) Nature, 256: 495-497, the human B cell hybridoma technique (Kozbor et al. (1983) Immunol. Today, 4: 72), the EBV-hybridoma technique (Cole et al. (1985), Monoclonal Antibodies and Cancer Therapy, Alan R. Liss, Inc., pp. 77-96) or trioma techniques. The technology for producing hybridomas is well known (see generally Current Protocols in Immunology (1994) Coligan et al. (eds.) John Wiley & Sons, Inc., New York, N.Y.). Briefly, an immortal cell line (typically a myeloma) is fused to lymphocytes (typically splenocytes) from a mammal immunized with an immunogen as described above, and the culture supernatants of the resulting hybridoma cells are screened to identify a hybridoma producing a monoclonal antibody that binds a polypeptide of the invention.

[0116] Any of the many well known protocols used for fusing lymphocytes and immortalized cell lines can be applied for the purpose of generating a monoclonal antibody to a polypeptide of the invention (see, e.g., Current Protocols in Immunology, supra; Galfre et al. (1977) Nature, 266: 55052; R. H. Kenneth, in Monoclonal Antibodies: A New Dimension In Biological Analyses, Plenum Publishing Corp., New York, N.Y. (1980); and Lerner (1981) Yale J. Biol. Med., 54: 387-402. Moreover, the ordinarily skilled worker will appreciate that there are many variations of such methods that also would be useful.

[0117] Alternative to preparing monoclonal antibody-secreting hybridomas, a monoclonal antibody to a polypeptide of the invention can be identified and isolated by screening a recombinant combinatorial immunoglobulin library (e.g., an antibody phage display library) with the polypeptide to thereby isolate immunoglobulin library members that bind the polypeptide. Kits for generating and screening phage display libraries are commercially available (e.g., the Pharmacia Recombinant Phage Antibody System, Catalog No. 27-9400-01; and the Stratagene SurfZAP™ Phage Display Kit, Catalog No. 240612). Additionally, examples of methods and reagents particularly amenable for use in generating and screening antibody display library can be found in, for example, U.S. Pat. No. 5,223,409; PCT Publication No. WO 92/18619; PCT Publication No. WO 91/17271; PCT Publication No. WO 92/20791; PCT Publication No. WO 92/15679; PCT Publication No. WO 93/01288; PCT Publication No. WO 92/01047; PCT Publication No. WO 92/09690; PCT Publication No. WO 90/02809; Fuchs et al. (1991) Bio/Technology, 9: 1370-1372; Hay et al. (1992) Hum. Antibod. Hybridomas, 3: 81-85; Huse et al. (1989) Science, 246: 1275-1281; Griffiths et al. (1993) EMBO J., 12: 725-734.

[0118] Additionally, recombinant antibodies, such as chimeric and humanized monoclonal antibodies, comprising both human and non-human portions, which can be made using standard recombinant DNA techniques, are within the scope of the invention. Such chimeric and humanized monoclonal antibodies can be produced by recombinant DNA techniques known in the art.

[0119] In general, antibodies of the invention (e.g., a monoclonal antibody) can be used to isolate a polypeptide of the invention by standard techniques, such as affinity chromatography or immunoprecipitation. A polypeptide-specific antibody can facilitate the purification of natural polypeptide from cells and of recombinantly produced polypeptide expressed in host cells. Moreover, an antibody specific for a polypeptide of the invention can be used to detect the polypeptide (e.g., in a cellular lysate, cell supernatant, or tissue sample) in order to evaluate the abundance and pattern of expression of the polypeptide. Antibodies can be used diagnostically to monitor protein levels in tissue as part of a clinical testing procedure, e.g., to, for example, determine the efficacy of a given treatment regimen. Coupling the antibody to a detectable substance can facilitate detection. Examples of detectable substances include various enzymes, prosthetic groups, fluorescent materials, luminescent materials, bioluminescent materials, and radioactive materials. Examples of suitable enzymes include horseradish peroxidase, alkaline phosphatase, β-galactosidase, or acetylcholinesterase; examples of suitable prosthetic group complexes include streptavidin/biotin and avidin/biotin; examples of suitable fluorescent materials include umbelliferone, fluorescein, fluorescein isothiocyanate, rhodamine, dichlorotriazinylamine fluorescein, dansyl chloride or phycoerythrin; an example of a luminescent material includes luminol; examples of bioluminescent materials include luciferase, luciferin, and aequorin, and examples of suitable radioactive material include 125I, 131I, 35S or 3H.

Diagnostic Assays

[0120] The nucleic acids, probes, primers, polypeptides and antibodies described herein can be used in methods of diagnosis of stroke or diagnosis of a susceptibility to stroke or to a disease or condition associated with an stroke gene, such as PDE4D, as well as in kits useful for diagnosis of stroke or a susceptibility to stroke or to a disease or condition associated with PDE4D. In one embodiment, the kit useful for diagnosis of stroke or susceptibility to stroke, or to a disease or condition associated with PDE4D comprises primers as described herein, wherein the primers contain one or more of the SNPs identified herein. In parallel, definition of stroke risk associated with PDE4D/cAMP pathway is useful and novel to define subgroups of individuals who would be best treated by pharmaceutical agents acting on PDE4D and/cAMP pathways (and vice versa).

[0121] In one embodiment of the invention, diagnosis of stroke or susceptibility to stroke (or diagnosis of or susceptibility to a disease or condition associated with PDE4D) is made by detecting a polymorphism in a PDE4D nucleic acid as described herein. The polymorphism can be an alteration in a PDE4D nucleic acid, such as the insertion or deletion of a single nucleotide, or of more than one nucleotide, resulting in a frame shift alteration; the change of at least one nucleotide, resulting in a change in the encoded amino acid; the change of at least one nucleotide, resulting in the generation of a premature stop codon; the deletion of several nucleotides, resulting in a deletion of one or more amino acids encoded by the nucleotides; the insertion of one or several nucleotides, such as by unequal recombination or gene conversion, resulting in an interruption of the coding sequence of the gene or nucleic acid; duplication of all or a part of the gene or nucleic acid; transposition of all or a part of the gene or nucleic acid; or rearrangement of all or a part of the gene or nucleic acid. More than one such alteration may be present in a single gene or nucleic acid. Such sequence changes cause an alteration in the polypeptide encoded by a PDE4D nucleic acid. For example, if the alteration is a frame shift alteration, the frame shift can result in a change in the encoded amino acids, and/or can result in the generation of a premature stop codon, causing generation of a truncated polypeptide. Alternatively, a polymorphism associated with a disease or condition associated with a PDE4D nucleic acid or a susceptibility to a disease or condition associated with a PDE4D nucleic acid can be a synonymous alteration in one or more nucleotides (i.e., an alteration that does not result in a change in the polypeptide encoded by a PDE4D nucleic acid). For diagnostic applications, there may be polymorphisms informative for prediction of disease risk that are in linkage disequilibrium with the functional polymorphism. Such a polymorphism may alter splicing sites, affect the stability or transport of mRNA, or otherwise affect the transcription or translation of the nucleic acid. A PDE4D nucleic acid that has any of the alteration described above is referred to herein as an “altered nucleic acid.”

[0122] In a first method of diagnosing stroke or a susceptibility to stroke, hybridization methods, such as Southern analysis, Northern analysis, or in situ hybridizations, can be used (see Current Protocols in Molecular Biology, Ausubel, F. et al., eds., John Wiley & Sons, including all supplements through 1999). For example, a biological sample from a test subject (a “test sample”) of genomic DNA, RNA, or cDNA, is obtained from an individual suspected of having, being susceptible to or predisposed for, or carrying a defect for, a susceptibility to a disease or condition associated with a PDE4D nucleic acid (the “test individual”). The individual can be an adult, child, or fetus. The test sample can be from any source which contains genomic DNA, such as a blood sample, sample of amniotic fluid, sample of cerebrospinal fluid, or tissue sample from skin, muscle, buccal or conjunctival mucosa, placenta, gastrointestinal tract or other organs. A test sample of DNA from fetal cells or tissue can be obtained by appropriate methods, such as by amniocentesis or chorionic villus sampling. The DNA, RNA, or cDNA sample is then examined to determine whether a polymorphism in a stroke nucleic acid is present, and/or to determine which splicing variant(s) encoded by the PDE4D is present. The presence of the polymorphism or splicing variant(s) can be indicated by hybridization of the nucleic acid in the genomic DNA, RNA, or cDNA to a nucleic acid probe. A “nucleic acid probe,” as used herein, can be a DNA probe or an RNA probe; the nucleic acid probe can contain at least one polymorphism in a PDE4D nucleic acid contains a nucleic acid encoding a particular splicing variant of a PDE4D nucleic acid. The probe can be any of the nucleic acid molecules described above (e.g., the nucleic acid, a fragment, a vector comprising the nucleic acid, a probe or primer, etc.).

[0123] To diagnose a susceptibility to stroke, a hybridization sample is formed by contacting the test sample containing PDE4D, with at least one nucleic acid probe. A preferred probe for detecting mRNA or genomic DNA is a labeled nucleic acid probe capable of hybridizing to mRNA or genomic DNA sequences described herein. The nucleic acid probe can be, for example, a full-length nucleic acid molecule, or a portion thereof, such as an oligonucleotide of at least 15, 30, 50, 100, 250 or 500 nucleotides in length and sufficient to specifically hybridize under stringent conditions to appropriate mRNA or genomic DNA. For example, the nucleic acid probe can be all or a portion of SEQ ID NO: 1 which may optionally comprise at least one polymorphism shown in Tables 11 and 12, or the complement thereof, or a portion thereof, or can be a nucleic acid encoding a portion of SEQ ID NO: 2, 3, 4, 5, 6, 7, 8, 9, 10, 12 or 14. Other suitable probes for use in the diagnostic assays of the invention are described above (see e.g., probes and primers discussed under the heading, “Nucleic Acids of the Invention”).

[0124] The hybridization sample is maintained under conditions that are sufficient to allow specific hybridization of the nucleic acid probe to PDE4D. “Specific hybridization”, as used herein, indicates exact hybridization (e.g., with no mismatches). Specific hybridization can be performed under high stringency conditions or moderate stringency conditions, for example, as described above. In a particularly preferred embodiment, the hybridization conditions for specific hybridization are high stringency.

[0125] Specific hybridization, if present, is then detected using standard methods. If specific hybridization occurs between the nucleic acid probe and PDE4D in the test sample, then PDE4D has the polymorphism, or is the splicing variant, that is present in the nucleic acid probe. More than one nucleic acid probe can also be used concurrently in this method. In one embodiment, specific hybridization of at least one of the nucleic acid probes is indicative of a polymorphism in PDE4D, or of the presence of a particular splicing variant encoding PDE4D and is therefore diagnostic for a susceptibility to stroke.

[0126] In Northern analysis (see Current Protocols in Molecular Biology, Ausubel, F. et al., eds., John Wiley & Sons, supra) the hybridization methods described above are used to identify the presence of a polymorphism or a particular splicing variant, associated with a susceptibility to stroke. For Northern analysis, a test sample of RNA is obtained from the individual by appropriate means. Specific hybridization of a nucleic acid probe, as described above, to RNA from the individual is indicative of a polymorphism in PDE4D, or of the presence of a particular splicing variant encoded by PDE4D, and is therefore diagnostic for a susceptibility to stroke.

[0127] For representative examples of use of nucleic acid probes, see, for example, U.S. Pat. Nos. 5,288,611 and 4,851,330.

[0128] Alternatively, a peptide nucleic acid (PNA) probe can be used instead of a nucleic acid probe in the hybridization methods described above. PNA is a DNA mimic having a peptide-like, inorganic backbone, such as N-(2-aminoethyl)glycine units, with an organic base (A, G, C, T or U) attached to the glycine nitrogen via a methylene carbonyl linker (see, for example, Nielsen, P. E. et al., Bioconjugate Chemistry, 1994, 5, American Chemical Society, p. 1 (1994). The PNA probe can be designed to specifically hybridize to a gene having a polymorphism associated with a susceptibility to stroke. Hybridization of the PNA probe to PDE4D is diagnostic for a susceptibility to stroke.

[0129] In another method of the invention, mutation analysis by restriction digestion can be used to detect a mutant gene, or genes containing a polymorphism(s), if the mutation or polymorphism in the gene results in the creation or elimination of a restriction site. If a restriction site is not naturally created, one can be created by PCR that depends on the polymorphism and allows genotyping. A test sample containing genomic DNA is obtained from the individual. Nucleic acid amplification methods, including but not limited to Polymerase chain reaction (PCR), Transcription Mediated Amplifications (TMA), and Ligase Mediate Amplification (LMA), can be used to amplify PDE4D. The digestion pattern of the relevant DNA fragment indicates the presence or absence of the mutation or polymorphism in PDE4D, and therefore indicates the presence or absence of this susceptibility to stroke. RFLP analysis is conducted as described (see Current Protocols in Molecular Biology, supra). Amplification techniques based upon detection of sequence of interest using reverse dot blot technology (linear array or strips) can be used and are described, for example, in U.S. Pat. No. 5,468,613.

[0130] Sequence analysis can also be used to detect specific polymorphisms in PDE4D. A test sample of DNA or RNA is obtained from the test individual. PCR or other appropriate methods can be used to amplify the gene, and/or its flanking sequences, if desired. The sequence of PDE4D, or a fragment of the gene, or cDNA, or fragment of the cDNA, or mRNA, or fragment of the mRNA, is determined, using standard methods. The sequence of the gene, gene fragment, cDNA, cDNA fragment, mRNA, or mRNA fragment is compared with the known nucleic acid sequence of the gene, cDNA (e.g., SEQ ID NO: 1 which may optionally comprise at least one polymorphism shown in Tables 11 and 12, or a nucleic acid sequence encoding SEQ ID NO: 2, 3, 4, 5, 6, 7, 8, 9, 10, 12 or 14, or a fragment thereof) or mRNA, as appropriate. In one embodiment, the presence of at least one of the polymorphisms in PDE4D indicates that the individual has a susceptibility to stroke.

[0131] Allele-specific oligonucleotides can also be used to detect the presence of a polymorphism in PDE4D, through the use of dot-blot hybridization of amplified oligonucleotides with allele-specific oligonucleotide (ASO) probes (see, for example, Saiki, R. et al., (1986), Nature (London) 324: 163-166). An “allele-specific oligonucleotide” (also referred to herein as an “allele-specific oligonucleotide probe”) is an oligonucleotide of approximately 10-50 base pairs, preferably approximately 15-30 base pairs, that specifically hybridizes to PDE4D, and that contains a polymorphism associated with a susceptibility to stroke. An allele-specific oligonucleotide probe that is specific for particular polymorphisms in PDE4D can be prepared, using standard methods (see Current Protocols in Molecular Biology, supra). To identify polymorphisms in the gene that are associated with a susceptibility to stroke, a test sample of DNA is obtained from the individual. PCR can be used to amplify all or a fragment of PDE4D, and its flanking sequences. The DNA containing the amplified PDE4D (or fragment of the gene) is dot-blotted, using standard methods (see Current Protocols in Molecular Biology, supra), and the blot is contacted with the oligonucleotide probe. The presence of specific hybridization of the probe to the amplified PDE4D is then detected. Specific hybridization of an allele-specific oligonucleotide probe to DNA from the individual is indicative of a polymorphism in PDE4D, and is therefore indicative of a susceptibility to stroke.

[0132] The invention further provides allele-specific oligonucleotides that hybridize to the reference or variant allele of a nucleic acid comprising a single nucleotide polymorphism or to the complement thereof. These oligonucleotides can be probes or primers.

[0133] An allele-specific primer hybridizes to a site on target DNA overlapping a polymorphism and only primes amplification of an allelic form to which the primer exhibits perfect complementarity. See Gibbs, Nucleic Acid Res. 17, 2427-2448 (1989). This primer is used in conjunction with a second primer that hybridizes at a distal site. Amplification proceeds from the two primers, resulting in a detectable product that indicates the particular allelic form is present. A control is usually performed with a second pair of primers, one of which shows a single base mismatch at the polymorphic site and the other of which exhibits perfect complementarity to a distal site. The single-base mismatch prevents amplification and no detectable product is formed. The method works best when the mismatch is included in the 3′-most position of the oligonucleotide aligned with the polymorphism because this position is most destabilizing to elongation from the primer (see, e.g., WO 93/22456).

[0134] With the addition of such analogs as locked nucleic acids (LNAs), the size of primers and probes can be reduced to as few as 8 bases. LNAs are a novel class of bicyclic DNA analogs in which the 2′ and 4′ positions in the furanose ring are joined via an O-methylene (oxy-LNA), S-methylene (thio-LNA), or amino methylene (amino-LNA) moiety. Common to all of these LNA variants is an affinity toward complementary nucleic acids, which is by far the highest reported for a DNA analog. For example, particular all oxy-LNA nonamers have been shown to have melting temperatures of 64° C. and 74° C. when in complex with complementary DNA or RNA, respectively, as opposed to 28° C. for both DNA and RNA for the corresponding DNA nonamer. Substantial increases in Tₘ are also obtained when LNA monomers are used in combination with standard DNA or RNA monomers. For primers and probes, depending on where the LNA monomers are included (e.g., the 3′ end, the 5′end, or in the middle), the Tₘ could be increased considerably.

[0135] In another embodiment, arrays of oligonucleotide probes that are complementary to target nucleic acid sequence segments from an individual, can be used to identify polymorphisms in PDE4D. For example, in one embodiment, an oligonucleotide linear array can be used. Oligonucleotide arrays typically comprise a plurality of different oligonucleotide probes that are coupled to a surface of a substrate in different known locations. These oligonucleotide arrays, also described as “Genechips.TM.,” have been generally described in the art, for example, U.S. Pat. No. 5,143,854 and PCT patent publication Nos. WO 90/15070 and 92/10092. These arrays can generally be produced using mechanical synthesis methods or light directed synthesis methods that incorporate a combination of photolithographic methods and solid phase oligonucleotide synthesis methods. See Fodor et al., Science, 251: 767-777 (1991), Pirrung et al., U.S. Pat. No. 5,143,854 (see also PCT Application No. WO 90/15070) and Fodor et al., PCT Publication No. WO 92/10092 and U.S. Pat. No. 5,424,186, the entire teachings of each of which are incorporated by reference herein. Techniques for the synthesis of these arrays using mechanical synthesis methods are described in, e.g., U.S. Pat. No. 5,384,261, the entire teachings of which are incorporated by reference herein. In another embodiment, linear arrays or microarrays can be utilized.

[0136] Once an oligonucleotide array is prepared, a nucleic acid of interest is hybridized with the array and scanned for polymorphisms. Hybridization and scanning are generally carried out by methods described herein and also in, e.g., Published PCT Application Nos. WO 92/10092 and WO 95/11995, and U.S. Pat. No. 5,424,186, the entire teachings of which are incorporated by reference herein. In brief, a target nucleic acid sequence that includes one or more previously identified polymorphic markers is amplified by well-known amplification techniques, e.g., PCR. Typically, this involves the use of primer sequences that are complementary to the two strands of the target sequence both upstream and downstream from the polymorphism. Asymmetric PCR techniques may also be used. Amplified target, generally incorporating a label, is then hybridized with the array under appropriate conditions. Upon completion of hybridization and washing of the array, the array is scanned to determine the position on the array to which the target sequence hybridizes. The hybridization data obtained from the scan is typically in the form of fluorescence intensities as a function of location on the array.

[0137] Although primarily described in terms of a single detection block, e.g., for detection of a single polymorphism, arrays can include multiple detection blocks, and thus be capable of analyzing multiple, specific polymorphisms. In alternate arrangements, it will generally be understood that detection blocks may be grouped within a single array or in multiple, separate arrays so that varying, optimal conditions may be used during the hybridization of the target to the array. For example, it may often be desirable to provide for the detection of those polymorphisms that fall within G-C rich stretches of a genomic sequence, separately from those falling in A-T rich segments. This allows for the separate optimization of hybridization conditions for each situation.

[0138] Additional description of use of oligonucleotide arrays for detection of polymorphisms can be found, for example, in U.S. Pat. Nos. 5,858,659 and 5,837,832, the entire teachings of which are incorporated by reference herein.

[0139] Other methods of nucleic acid analysis can be used to detect polymorphisms in PDE4D or splicing variants encoding by PDE4D. Representative methods include direct manual sequencing (Church and Gilbert, (1988), Proc. Natl. Acad. Sci. USA 81: 1991-1995; Sanger, F. et al. (1977) Proc. Natl. Acad. Sci. 74: 5463-5467; Beavis et al., U.S. Pat. No. 5,288,644); automated fluorescent sequencing; single-stranded conformation polymorphism assays (SSCP); clamped denaturing gel electrophoresis (CDGE); denaturing gradient gel electrophoresis (DGGE) (Sheffield, V. C. et al. (19891) Proc. Natl. Acad. Sci. USA 86: 232-236), mobility shift analysis (Orita, M. et al. (1989) Proc. Natl. Acad. Sci. USA 86: 2766-2770), restriction enzyme analysis (Flavell et al. (1978) Cell 15: 25; Geever, et al (1981) Proc. Natl. Acad. Sci. USA 78: 5081); heteroduplex analysis; chemical mismatch cleavage (CMC) (Cotton et al. (1985) Proc. Natl. Acad. Sci. USA 85: 4397-4401); RNase protection assays (Myers, R. M. et al. (1985) Science 230: 1242); use of polypeptides which recognize nucleotide mismatches, such as E. coli mutS protein, for example.

[0140] In one embodiment of the invention, diagnosis of a disease or condition associated with PDE4D (e.g., stroke) or a susceptibility to a disease or condition associated with PDE4D (e.g., stroke) can also be made by expression analysis by quantitative PCR (kinetic thermal cycling). This technique utilizing TaqMan® or Lightcycler® can be used to allow the identification of polymorphisms and whether a patient is homozygous or heterozygous. The technique can assess the presence of an alteration in the expression or composition of the polypeptide encoded by a PDE4D nucleic acid or splicing variants encoded by a PDE4D nucleic acid. Further, the expression of the variants can be quantified as physically or functionally different.

[0141] In another embodiment of the invention, diagnosis of a susceptibility to stroke can also be made by examining expression and/or composition of an PDE4D polypeptide, by a variety of methods, including enzyme linked immunosorbent assays (ELISAs), Western blots, immunoprecipitations and immunofluorescence. A test sample from an individual is assessed for the presence of an alteration in the expression and/or an alteration in composition of the polypeptide encoded by PDE4D, or for the presence of a particular variant (e.g., an isoform) encoded by PDE4D. An alteration in expression of a polypeptide encoded by PDE4D can be, for example, an alteration in the quantitative polypeptide expression (i.e., the amount of polypeptide produced); an alteration in the composition of a polypeptide encoded by PDE4D is an alteration in the qualitative polypeptide expression (e.g., expression of a mutant PDE4D polypeptide or of a different splicing variant or isoform). In one embodiment, detecting a particular splicing variant encoded by that PDE4D, or a particular pattern of splicing variants makes diagnosis of the disease or condition associated with PDE4D or a susceptibility to a disease or condition associated with PDE4D.

[0142] Both such alterations (quantitative and qualitative) can also be present. An “alteration” in the polypeptide expression or composition, as used herein, refers to an alteration in expression or composition in a test sample, as compared with the expression or composition of polypeptide by PDE4D in a control sample. A control sample is a sample that corresponds to the test sample (e.g., is from the same type of cells), and is from an individual who is not affected by stroke. An alteration in the expression or composition of the polypeptide in the test sample, as compared with the control sample, is indicative of a susceptibility to stroke. Similarly, the presence of one or more different splicing variants or isoforms in the test sample, or the presence of significantly different amounts of different splicing variants in the test sample, as compared with the control sample, is indicative of a susceptibility to stroke. Various means of examining expression or composition of the polypeptide encoded by PDE4D can be used, including spectroscopy, colorimetry, electrophoresis, isoelectric focusing, and immunoassays (e.g., David et al., U.S. Pat. No. 4,376,110) such as immunoblotting (see also Current Protocols in Molecular Biology, particularly chapter 10). For example, in one embodiment, an antibody capable of binding to the polypeptide (e.g., as described above), preferably an antibody with a detectable label, can be used. Antibodies can be polyclonal, or more preferably, monoclonal. An intact antibody, or a fragment thereof (e.g., Fab or F(ab′)₂) can be used. The term “labeled”, with regard to the probe or antibody, is intended to encompass direct labeling of the probe or antibody by coupling (i.e., physically linking) a detectable substance to the probe or antibody, as well as indirect labeling of the probe or antibody by reactivity with another reagent that is directly labeled. Examples of indirect labeling include detection of a primary antibody using a fluorescently labeled secondary antibody and end-labeling of a DNA probe with biotin such that it can be detected with fluorescently labeled streptavidin.

[0143] Western blotting analysis, using an antibody as described above that specifically binds to a polypeptide encoded by a mutant PDE4D, or an antibody that specifically binds to a polypeptide encoded by a non-mutant gene, or an antibody that specifically binds to a particular splicing variant encoded by PDE4D, can be used to identify the presence in a test sample of a particular splicing variant or isoform, or of a polypeptide encoded by a polymorphic or mutant PDE4D, or the absence in a test sample of a particular splicing variant or isoform, or of a polypeptide encoded by a non-polymorphic or non-mutant gene. The presence of a polypeptide encoded by a polymorphic or mutant gene, or the absence of a polypeptide encoded by a non-polymorphic or non-mutant gene, is diagnostic for a susceptibility to stroke, as is the presence (or absence) of particular splicing variants encoded by the PDE4D gene.

[0144] In one embodiment of this method, the level or amount of polypeptide encoded by PDE4D in a test sample is compared with the level or amount of the polypeptide encoded by PDE4D in a control sample. A level or amount of the polypeptide in the test sample that is higher or lower than the level or amount of the polypeptide in the control sample, such that the difference is statistically significant, is indicative of an alteration in the expression of the polypeptide encoded by PDE4D, and is diagnostic for a susceptibility to stroke. Alternatively, the composition of the polypeptide encoded by PDE4D in a test sample is compared with the composition of the polypeptide encoded by PDE4D in a control sample (e.g., the presence of different splicing variants). A difference in the composition of the polypeptide in the test sample, as compared with the composition of the polypeptide in the control sample, is diagnostic for a susceptibility to stroke. In another embodiment, both the level or amount and the composition of the polypeptide can be assessed in the test sample and in the control sample. A difference in the amount or level of the polypeptide in the test sample, compared to the control sample; a difference in composition in the test sample, compared to the control sample; or both a difference in the amount or level, and a difference in the composition, is indicative of a susceptibility to stroke.

[0145] In another embodiment, assessment of the splicing variant or isoform(s) of a polypeptide encoded by a polymorphic or mutant PDE4D, can be performed. The assessment can be performed directly (e.g., by examining the polypeptide itself), or indirectly (e.g., by examining the mRNA encoding the polypeptide, such as through mRNA profiling). For example, probes or primers as described herein can be used to determine which splicing variants or isoforms are encoded by PDE4D mRNA, using standard methods.

[0146] The presence in a test sample of a particular splicing variant(s) or isoform(s) associated with stroke or risk of stroke, or the absence in a test sample of a particular splicing variant(s) or isoform(s) not associated with stroke or risk of stroke, is diagnostic for a disease or condition associated with a PDE4D gene or a susceptibility to a disease or condition associated with a PDE4D gene. Similarly, the absence in a test sample of a particular splicing variant(s) or isoform(s) associated with stroke or risk of stroke, or the presence in a test sample of a particular splicing variant(s) or isoform(s) not associated with stroke or risk of stroke, is diagnostic for the absence of disease or condition associated with a PDE4D gene or a susceptibility to a disease or condition associated with a PDE4D gene.

[0147] In another embodiment, differential expression of isoforms PDE4D7, PDE4D9 and combinations thereof can be assessed and compared to control individuals. Decreased expression of these isoforms is indicative of susceptibility to stroke, particularly carotid stroke and/or cardiogenic stroke.

[0148] The invention further pertains to a method for the diagnosis and identification of susceptibility to stroke in an individual, by identifying an at-risk haplotype in PDE4D. In one embodiment, the at-risk haplotype is a haplotype for which the presence of the haplotype increases the risk of stroke significantly. Although it is to be understood that identifying whether a risk is significant may depend on a variety of factors, including the specific disease, the haplotype, and often, environmental factors, the significance may be measured by an odds ratio or a percentage. In a further embodiment, the significance is measured by a percentage. In one embodiment, a significant risk is measured as an odds ratio of at least about 1.2, including but not limited to: 1.2, 1.3, 1.4, 1.5, 1.6, 1.7, 1.8 and 1.9. In a further embodiment, an odds ratio of at least 1.2 is significant. In a further embodiment, an odds ratio of at least about 1.5 is significant. In a further embodiment, a significant increase in risk is at least about 1.7 is significant. In a further embodiment, a significant increase in risk is at least about 20%, including but not limited to about 25%, 30%, 35%, 40%, 45%, 50%, 55%, 60%, 65%, 70%, 75%, 80%, 85%, 90%, 95% and 98%. In a further embodiment, a significant increase in risk is at least about 50%. It is understood however, that identifying whether a risk is medically significant may also depend on a variety of factors, including the specific disease, the haplotype, and often, environmental factors.

[0149] The invention also pertains to methods of diagnosing stroke or a susceptibility to stroke in an individual, comprising screening for an at-risk haplotype in the PDE4D nucleic acid that is more frequently present in an individual susceptible to stroke (affected), compared to the frequency of its presence in a healthy individual (control), wherein the presence of the haplotype is indicative of stroke or susceptibility to stroke. Standard techniques for genotyping for the presence of SNPs and/or microsatellite markers that are associated with stroke can be used, such as fluorescent-based techniques (Chen, et al., Genome Res. 9, 492 (1999), PCR, LCR, Nested PCR and other techniques for nucleic acid amplification. In one embodiment, the method comprises assessing in an individual the presence or frequency of SNPs and/or microsatellites in the PDE4D nucleic acid that are associated with stroke, wherein an excess or higher frequency of the SNPs and/or microsatellites compared to a healthy control individual is indicative that the individual has stroke or is susceptible to stroke.

[0150] See Table 2C, Table 3, Table 4Λ, and 4B for SNPs and markers that comprise haplotypes that can be used as screening tools. See also, Table 5, Table 6, Table 11 and Table 12 that set forth previously known SNP and novel microsatellite markers and their counterpart sequence ID reference numbers. SNPs and markers from these lists represent at-risk haplotypes and can be used to design diagnostic tests for determining a susceptibility to stroke.

[0151] Kits (e.g., reagent kits) useful in the methods of diagnosis comprise components useful in any of the methods described herein, including for example, hybridization probes or primers as described herein (e.g., labeled probes or primers), reagents for detection of labeled molecules, restriction enzymes (e.g., for RFLP analysis), allele-specific oligonucleotides, antibodies which bind to altered or to non-altered (native) PDE4D polypeptide, means for amplification of nucleic acids comprising PDE4D, or means for analyzing the nucleic acid sequence of PDE4D or for analyzing the amino acid sequence of an PDE4D polypeptide, etc. In one embodiment, a kit for diagnosing susceptibility to stroke can comprise primers for nucleic acid amplification of a region in the PDE4D gene comprising an at-risk haplotype that is more frequently present in an individual susceptible to stroke. The primers can be designed using portions of the nucleic acids flanking SNPs that are indicative of stroke. In a particularly preferred embodiment, the primers are designed to amplify regions of the PDE4D gene associated with an at-risk haplotype for stroke, shown in Tables 8A and 8B. In another embodiment of the invention, a kit for diagnosing susceptibility to stroke can further comprise probes designed to hybridize to regions of the PDE4D gene associated with an at-risk haplotype for stroke, shown in Table 5 and table 6 and/or generated from SEQ ID Nos: 85-102.

Screening Assays and Agents Identified Thereby

[0152] The invention provides methods (also referred to herein as “screening assays”) for identifying the presence of a nucleotide that hybridizes to a nucleic acid of the invention, as well as for identifying the presence of a polypeptide encoded by a nucleic acid of the invention. In one embodiment, the presence (or absence) of a nucleic acid molecule of interest (e.g., a nucleic acid that has significant homology with a nucleic acid of the invention) in a sample can be assessed by contacting the sample with a nucleic acid comprising a nucleic acid of the invention (e.g., a nucleic acid having the sequence of SEQ ID NO: 1 which may optionally comprise at least one polymorphism shown in Tables 11 and 12, or the complement thereof, or a nucleic acid encoding an amino acid having the sequence of SEQ ID NO: 2, 3, 4, 5, 6, 7, 8, 9, 10, 12 or 14, or a fragment or variant of such nucleic acids), under stringent conditions as described above, and then assessing the sample for the presence (or absence) of hybridization. In another embodiment, high stringency conditions are conditions appropriate for selective hybridization. In another embodiment, a sample containing the nucleic acid molecule of interest is contacted with a nucleic acid containing a contiguous nucleotide sequence (e.g., a primer or a probe as described above) that is at least partially complementary to a part of the nucleic acid molecule of interest (e.g., a PDE4D nucleic acid), and the contacted sample is assessed for the presence or absence of hybridization. In another embodiment, the nucleic acid containing a contiguous nucleotide sequence is completely complementary to a part of the nucleic acid molecule of interest.

[0153] In any of these embodiments, all or a portion of the nucleic acid of interest can be subjected to amplification prior to performing the hybridization.

[0154] In another embodiment, the presence (or absence) of a polypeptide of interest, such as a polypeptide of the invention or a fragment or variant thereof, in a sample can be assessed by contacting the sample with an antibody that specifically hybridizes to the polypeptide of interest (e.g., an antibody such as those described above), and then assessing the sample for the presence (or absence) of binding of the antibody to the polypeptide of interest.

[0155] In another embodiment, the invention provides methods for identifying agents (e.g., fusion proteins, polypeptides, peptidomimetics, prodrugs, receptors, binding agents, antibodies, small molecules or other drugs, or ribozymes) that alter (e.g., increase or decrease) the activity of the polypeptides described herein, or which otherwise interact with the polypeptides herein. For example, such agents can be agents which bind to polypeptides described herein (e.g., PDE4D binding agents); which have a stimulatory or inhibitory effect on, for example, activity of polypeptides of the invention; or which change (e.g., enhance or inhibit) the ability of the polypeptides of the invention to interact with PDE4D binding agents (e.g., receptors or other binding agents); or which alter posttranslational processing of the PDE4D polypeptide (e.g., agents that alter proteolytic processing to direct the polypeptide from where it is normally synthesized to another location in the cell, such as the cell surface); agents that alter proteolytic processing such that more polypeptide is released from the cell, etc.

[0156] In one embodiment, the invention provides assays for screening candidate or test agents that bind to or modulate the activity of polypeptides described herein (or biologically active portion(s) thereof), as well as agents identifiable by the assays. Test agents can be obtained using any of the numerous approaches in combinatorial library methods known in the art, including: biological libraries; spatially addressable parallel solid phase or solution phase libraries; synthetic library methods requiring deconvolution; the ‘one-bead one-compound’ library method; and synthetic library methods using affinity chromatography selection. The biological library approach is limited to polypeptide libraries, while the other four approaches are applicable to polypeptide, non-peptide oligomer or small molecule libraries of compounds (Lam, K. S. (1997) Anticancer Drug Des., 12: 145).

[0157] In one embodiment, to identify agents which alter the activity of a PDE4D polypeptide, a cell, cell lysate, or solution containing or expressing a PDE4D polypeptide (e.g., SEQ ID NO: 2, 3, 4, 5, 6, 7, 8, 9, 10, 12 or 14, or another splicing variant encoded by PDE4D), or a fragment or derivative thereof (as described above), can be contacted with an agent to be tested; alternatively, the polypeptide can be contacted directly with the agent to be tested. The level (amount) of PDE4D activity is assessed (e.g., the level (amount) of PDE4D activity is measured, either directly or indirectly), and is compared with the level of activity in a control (i.e., the level of activity of the PDE4D polypeptide or active fragment or derivative thereof in the absence of the agent to be tested). If the level of the activity in the presence of the agent differs, by an amount that is statistically significant, from the level of the activity in the absence of the agent, then the agent is an agent that alters the activity of PDE4D polypeptide. An increase in the level of PDE4D activity relative to level of the control, indicates that the agent is an agent that enhances (is an agonist of) PDE4D activity. Similarly, a decrease in the level of PDE4D activity relative to level of the control, indicates that the agent is an agent that inhibits (is an antagonist of) PDE4D activity. In another embodiment, the level of activity of a PDE4D polypeptide or derivative or fragment thereof in the presence of the agent to be tested, is compared with a control level that has previously been established. A level of the activity in the presence of the agent that differs from the control level by an amount that is statistically significant indicates that the agent alters PDE4D activity.

[0158] The present invention also relates to an assay for identifying agents which alter the expression of the PDE4D gene (e.g., antisense nucleic acids, fusion proteins, polypeptides, peptidomimetics, prodrugs, receptors, binding agents, antibodies, small molecules or other drugs, or ribozymes) which alter (e.g., increase or decrease) expression (e.g., transcription or translation) of the gene or which otherwise interact with the nucleic acids described herein, as well as agents identifiable by the assays. For example, a solution containing a nucleic acid encoding PDE4D polypeptide (e.g., PDE4D gene) can be contacted with an agent to be tested. The solution can comprise, for example, cells containing the nucleic acid or cell lysate containing the nucleic acid; alternatively, the solution can be another solution that comprises elements necessary for transcription/translation of the nucleic acid. Cells not suspended in solution can also be employed, if desired. The level and/or pattern of PDE4D expression (e.g. the level and/or pattern of mRNA or of protein expressed, such as the level and/or pattern of different splicing variants) is assessed, and is compared with the level and/or pattern of expression in a control (i.e., the level and/or pattern of the PDE4D expression in the absence of the agent to be tested). If the level and/or pattern in the presence of the agent differ, by an amount or in a manner that is statistically significant, from the level and/or pattern in the absence of the agent, then the agent is an agent that alters the expression of PDE4D. Enhancement of PDE4D expression indicates that the agent is an agonist of PDE4D activity. Similarly, inhibition of PDE4D expression indicates that the agent is an antagonist of PDE4D activity. In another embodiment, the level and/or pattern of PDE4D polypeptide(s) (e.g., different splicing variants) in the presence of the agent to be tested, is compared with a control level and/or pattern that have previously been established. A level and/or pattern in the presence of the agent that differs from the control level and/or pattern by an amount or in a manner that is statistically significant indicates that the agent alters PDE4D expression. In one embodiment, agents that can alter expression levels of isoforms PDE4D7 and/or PDE4D9 can be assessed, preferably to complement the expression levels to approximate the ratios of a healthy individual.

[0159] In another embodiment of the invention, agents which alter the expression of the PDE4D gene or which otherwise interact with the nucleic acids described herein, can be identified using a cell, cell lysate, or solution containing a nucleic acid encoding the promoter region of the PDE4D gene operably linked to a reporter gene. After contact with an agent to be tested, the level of expression of the reporter gene (e.g., the level of mRNA or of protein expressed) is assessed, and is compared with the level of expression in a control (i.e., the level of the expression of the reporter gene in the absence of the agent to be tested). If the level in the presence of the agent differs, by an amount or in a manner that is statistically significant, from the level in the absence of the agent, then the agent is an agent that alters the expression of PDE4D, as indicated by its ability to alter expression of a gene that is operably linked to the PDE4D gene promoter. Enhancement of the expression of the reporter indicates that the agent is an agonist of PDE4D activity. Similarly, inhibition of the expression of the reporter indicates that the agent is an antagonist of PDE4D activity. In another embodiment, the level of expression of the reporter in the presence of the agent to be tested, is compared with a control level that has previously been established. A level in the presence of the agent that differs from the control level by an amount or in a manner that is statistically significant indicates that the agent alters PDE4D expression.

[0160] Agents which alter the amounts of different splicing variants encoded by PDE4D (e.g., an agent which enhances activity of a first splicing variant, and which inhibits activity of a second splicing variant), as well as agents which are agonists of activity of a first splicing variant and antagonists of activity of a second splicing variant, can easily be identified using these methods described above.

[0161] In other embodiments of the invention, assays can be used to assess the impact of a test agent on the activity of a polypeptide in relation to a PDE4D binding agent. For example, a cell that expresses a compound that interacts with PDE4D (herein referred to as a “PDE4D binding agent”, which can be a polypeptide or other molecule that interacts with PDE4D, such as a receptor) is contacted with PDE4D in the presence of a test agent, and the ability of the test agent to alter the interaction between PDE4D and the PDE4D binding agent is determined. Alternatively, a cell lysate or a solution containing the PDE4D binding agent, can be used. An agent which binds to PDE4D or the PDE4D binding agent can alter the interaction by interfering with, or enhancing the ability of PDE4D to bind to, associate with, or otherwise interact with the PDE4D binding agent. Determining the ability of the test agent to bind to PDE4D or an PDE4D binding agent can be accomplished, for example, by coupling the test agent with a radioisotope or enzymatic label such that binding of the test agent to the polypeptide can be determined by detecting the labeled with ¹²⁵I, ³⁵S, ¹⁴C or ³H, either directly or indirectly, and the radioisotope detected by direct counting of radioemmission or by scintillation counting. Alternatively, test agents can be enzymatically labeled with, for example, horseradish peroxidase, alkaline phosphatase, or luciferase, and the enzymatic label detected by determination of conversion of an appropriate substrate to product. It is also within the scope of this invention to determine the ability of a test agent to interact with the polypeptide without the labeling of any of the interactants. For example, a microphysiometer can be used to detect the interaction of a test agent with PDE4D or a PDE4D binding agent without the labeling of either the test agent, PDE4D, or the PDE4D binding agent. McConnell, H. M. et al. (1992) Science, 257: 1906-1912. As used herein, a “microphysiometer” (e.g., Cytosensor™) is an analytical instrument that measures the rate at which a cell acidifies its environment using a light-addressable potentiometric sensor (LAPS). Changes in this acidification rate can be used as an indicator of the interaction between ligand and polypeptide. See the Examples Section for a discussion of known PDE4D binding partners. Thus, these receptors can be used to screen for compounds that are PDE4D receptor agonists for use in treating stroke or PDE4D receptor antagonists for studying stroke. The linkage data provided herein, for the first time, provides such connection to stroke. Drugs could be designed to regulate PDE4D receptor activation that in turn can be used to regulate signaling pathways and transcription events of genes downstream, such as Cbfa1.

[0162] In another embodiment of the invention, assays can be used to identify polypeptides that interact with one or more PDE4D polypeptides, as described herein. For example, a yeast two-hybrid system such as that described by Fields and Song (Fields, S. and Song, O., Nature 340: 245-246 (1989)) can be used to identify polypeptides that interact with one or more PDE4D polypeptides. In such a yeast two-hybrid system, vectors are constructed based on the flexibility of a transcription factor that has two functional domains (a DNA binding domain and a transcription activation domain). If the two domains are separated but fused to two different proteins that interact with one another, transcriptional activation can be achieved, and transcription of specific markers (e.g., nutritional markers such as His and Ade, or color markers such as lacZ) can be used to identify the presence of interaction and transcriptional activation. For example, in the methods of the invention, a first vector is used which includes a nucleic acid encoding a DNA binding domain and also an PDE4D polypeptide, splicing variant, fragment or derivative thereof, and a second vector is used which includes a nucleic acid encoding a transcription activation domain and also a nucleic acid encoding a polypeptide which potentially may interact with the PDE4D polypeptide, splicing variant, or fragment or derivative thereof (e.g., a PDE4D polypeptide binding agent or receptor). Incubation of yeast containing the first vector and the second vector under appropriate conditions (e.g., mating conditions such as used in the Matchmaker™ System from Clontech) allows identification of colonies which express the markers of interest. These colonies can be examined to identify the polypeptide(s) that interact with the PDE4D polypeptide or fragment or derivative thereof. Such polypeptides may be useful as agents that alter the activity of expression of a PDE4D polypeptide, as described above.

[0163] In more than one embodiment of the above assay methods of the present invention, it may be desirable to immobilize either PDE4D, the PDE4D binding agent, or other components of the assay on a solid support, in order to facilitate separation of complexed from uncomplexed forms of one or both of the polypeptides, as well as to accommodate automation of the assay. Binding of a test agent to the polypeptide, or interaction of the polypeptide with a binding agent in the presence and absence of a test agent, can be accomplished in any vessel suitable for containing the reactants. Examples of such vessels include microtitre plates, test tubes, and micro-centrifuge tubes. In one embodiment, a fusion protein (e.g., a glutathione-S-transferase fusion protein) can be provided which adds a domain that allows PDE4D or a PDE4D binding agent to be bound to a matrix or other solid support.

[0164] In another embodiment, modulators of expression of nucleic acid molecules of the invention are identified in a method wherein a cell, cell lysate, or solution containing a nucleic acid encoding PDE4D is contacted with a test agent and the expression of appropriate mRNA or polypeptide (e.g., splicing variant(s)) in the cell, cell lysate, or solution, is determined. The level of expression of appropriate mRNA or polypeptide(s) in the presence of the test agent is compared to the level of expression of mRNA or polypeptide(s) in the absence of the test agent. The test agent can then be identified as a modulator of expression based on this comparison. For example, when expression of mRNA or polypeptide is greater (statistically significantly greater) in the presence of the test agent than in its absence, the test agent is identified as a stimulator or enhancer of the mRNA or polypeptide expression. Alternatively, when expression of the mRNA or polypeptide is less (statistically significantly less) in the presence of the test agent than in its absence, the test agent is identified as an inhibitor of the mRNA or polypeptide expression. The level of mRNA or polypeptide expression in the cells can be determined by methods described herein for detecting mRNA or polypeptide.

[0165] This invention further pertains to novel agents identified by the above-described screening assays. Accordingly, it is within the scope of this invention to further use an agent identified as described herein in an appropriate animal model. For example, an agent identified as described herein (e.g., a test agent that is a modulating agent, an antisense nucleic acid molecule, a specific antibody, or a polypeptide-binding agent) can be used in an animal model to determine the efficacy, toxicity, or side effects of treatment with such an agent. Alternatively, an agent identified as described herein can be used in an animal model to determine the mechanism of action of such an agent. Furthermore, this invention pertains to uses of novel agents identified by the above-described screening assays for treatments as described herein. In addition, an agent identified as described herein can be used to alter activity of a polypeptide encoded by PDE4D, or to alter expression of PDE4D, by contacting the polypeptide or the gene (or contacting a cell comprising the polypeptide or the gene) with the agent identified as described herein.

Pharmaceutical Compositions

[0166] The present invention also pertains to pharmaceutical compositions comprising agents described herein, particularly nucleotides encoding the polypeptides described herein; comprising polypeptides described herein (e.g., one or more of SEQ ID NO: 2, 3, 4, 5, 6, 7, 8, 9, 10, 12 or 14); and/or comprising other splicing variants encoded by PDE4D; and/or an agent that alters (e.g., enhances or inhibits) PDE4D gene expression or PDE4D polypeptide activity as described herein. For instance, a polypeptide, protein (e.g., an PDE4D receptor), an agent that alters PDE4D gene expression, or a PDE4D binding agent or binding partner, fragment, fusion protein or prodrug thereof, or a nucleotide or nucleic acid construct (vector) comprising a nucleotide of the present invention, or an agent that alters PDE4D polypeptide activity, can be formulated with a physiologically acceptable carrier or excipient to prepare a pharmaceutical composition. The carrier and composition can be sterile. The formulation should suit the mode of administration.

[0167] Suitable pharmaceutically acceptable carriers include but are not limited to water, salt solutions (e.g., NaCl), saline, buffered saline, alcohols, glycerol, ethanol, gum arabic, vegetable oils, benzyl alcohols, polyethylene glycols, gelatin, carbohydrates such as lactose, amylose or starch, dextrose, magnesium stearate, talc, silicic acid, viscous paraffin, perfume oil, fatty acid esters, hydroxymethylcellulose, polyvinyl pyrolidone, etc., as well as combinations thereof. The pharmaceutical preparations can, if desired, be mixed with auxiliary agents, e.g., lubricants, preservatives, stabilizers, wetting agents, emulsifiers, salts for influencing osmotic pressure, buffers, coloring, flavoring and/or aromatic substances and the like which do not deleteriously react with the active agents.

[0168] The composition, if desired, can also contain minor amounts of wetting or emulsifying agents, or pH buffering agents. The composition can be a liquid solution, suspension, emulsion, tablet, pill, capsule, sustained release formulation, or powder. The composition can be formulated as a suppository, with traditional binders and carriers such as triglycerides. Oral formulation can include standard carriers such as pharmaceutical grades of mannitol, lactose, starch, magnesium stearate, polyvinyl pyrolidone, sodium saccharine, cellulose, magnesium carbonate, etc.

[0169] Methods of introduction of these compositions include, but are not limited to, intradermal, intramuscular, intraperitoneal, intraocular, intravenous, subcutaneous, topical, oral and intranasal. Other suitable methods of introduction can also include gene therapy (as described below), rechargeable or biodegradable devices, particle acceleration devises (“gene guns”) and slow release polymeric devices. The pharmaceutical compositions of this invention can also be administered as part of a combinatorial therapy with other agents.

[0170] The composition can be formulated in accordance with the routine procedures as a pharmaceutical composition adapted for administration to human beings. For example, compositions for intravenous administration typically are solutions in sterile isotonic aqueous buffer. Where necessary, the composition may also include a solubilizing agent and a local anesthetic to ease pain at the site of the injection. Generally, the ingredients are supplied either separately or mixed together in unit dosage form, for example, as a dry lyophilized powder or water free concentrate in a hermetically sealed container such as an ampule or sachette indicating the quantity of active agent. Where the composition is to be administered by infusion, it can be dispensed with an infusion bottle containing sterile pharmaceutical grade water, saline or dextrose/water. Where the composition is administered by injection, an ampule of sterile water for injection or saline can be provided so that the ingredients may be mixed prior to administration.

[0171] For topical application, nonsprayable forms, viscous to semi-solid or solid forms comprising a carrier compatible with topical application and having a dynamic viscosity preferably greater than water, can be employed. Suitable formulations include but are not limited to solutions, suspensions, emulsions, creams, ointments, powders, enemas, lotions, sols, liniments, salves, aerosols, etc., which are, if desired, sterilized or mixed with auxiliary agents, e.g., preservatives, stabilizers, wetting agents, buffers or salts for influencing osmotic pressure, etc. The agent may be incorporated into a cosmetic formulation. For topical application, also suitable are sprayable aerosol preparations wherein the active ingredient, preferably in combination with a solid or liquid inert carrier material, is packaged in a squeeze bottle or in admixture with a pressurized volatile, normally gaseous propellant, e.g., pressurized air.

[0172] Agents described herein can be formulated as neutral or salt forms. Pharmaceutically acceptable salts include those formed with free amino groups such as those derived from hydrochloric, phosphoric, acetic, oxalic, tartaric acids, etc., and those formed with free carboxyl groups such as those derived from sodium, potassium, ammonium, calcium, ferric hydroxides, isopropylamine, triethylamine, 2-ethylamino ethanol, histidine, procaine, etc.

[0173] The agents are administered in a therapeutically effective amount. The amount of agents which will be therapeutically effective in the treatment of a particular disorder or condition will depend on the nature of the disorder or condition, and can be determined by standard clinical techniques. In addition, in vitro or in vivo assays may optionally be employed to help identify optimal dosage ranges. The precise dose to be employed in the formulation will also depend on the route of administration, and the seriousness of the symptoms of stroke, and should be decided according to the judgment of a practitioner and each patient's circumstances. Effective doses may be extrapolated from dose-response curves derived from in vitro or animal model test systems.

[0174] The invention also provides a pharmaceutical pack or kit comprising one or more containers filled with one or more of the ingredients of the pharmaceutical compositions of the invention. Optionally associated with such container(s) can be a notice in the form prescribed by a governmental agency regulating the manufacture, use or sale of pharmaceuticals or biological products, which notice reflects approval by the agency of manufacture, use of sale for human administration. The pack or kit can be labeled with information regarding mode of administration, sequence of drug administration (e.g., separately, sequentially or concurrently), or the like. The pack or kit may also include means for reminding the patient to take the therapy. The pack or kit can be a single unit dosage of the combination therapy or it can be a plurality of unit dosages. In particular, the agents can be separated, mixed together in any combination, present in a single vial or tablet. Agents assembled in a blister pack or other dispensing means is preferred. For the purpose of this invention, unit dosage is intended to mean a dosage that is dependent on the individual pharmacodynamics of each agent and administered in FDA approved dosages in standard time courses.

Methods of Therapy

[0175] The present invention encompasses methods of treatment (prophylactic and/or therapeutic) for stroke or a susceptibility to stroke, such as individuals in the target populations described herein particularly ischemic (e.g., carotid and cardiogenic strokes) and TIA, using a PDE4D therapeutic agent. A “PDE4D therapeutic agent” is an agent that alters (e.g., enhances or inhibits) PDE4D polypeptide (enzymatic activity) and/or PDE4D gene expression, as described herein (e.g., a PDE4D agonist or antagonist). PDE4D therapeutic agents can alter PDE4D polypeptide activity or nucleic acid expression by a variety of means, such as, for example, by providing additional PDE4D polypeptide or by upregulating the transcription or translation of the PDE4D gene; by altering posttranslational processing of the PDE4D polypeptide; by altering transcription of PDE4D splicing variants; or by interfering with PDE4D polypeptide activity (e.g., by binding to a PDE4D polypeptide), or by downregulating the transcription or translation of the PDE4D gene.

[0176] In particular, the invention relates to methods of treatment for stroke or susceptibility to stroke (for example, for individuals in an at-risk population such as those described herein); as well as to methods of treatment for myocardial infarction, atherosclerosis, acute coronary syndrome (e.g., unstable angina, non-ST-elevation myocardial infarction (NSTEMI) or ST-elevation myocardial infarction (STEMI)); for decreasing risk of a second myocardial infarction; for atherosclerosis, such as for patients requiring treatment (e.g., angioplasty, stents, coronary artery bypass graft) to restore blood flow in arteries (e.g., coronary arteries) and peripheral arterial occlusive disease.

[0177] Representative PDE4D therapeutic agents include the following:
[0178] nucleic acids or fragments or derivatives thereof described herein, particularly nucleotides encoding the polypeptides described herein and vectors comprising such nucleic acids (e.g., a gene, cDNA, and/or mRNA, double-stranded interfering RNA, a nucleic acid encoding a PDE4D polypeptide or active fragment or derivative thereof, or an oligonucleotide; for example, SEQ ID NO: 1 which may optionally comprise at least one polymorphism shown in Tables 11 and 12 or a nucleic acid encoding SEQ ID NO: 2, 3, 4, 5, 6, 7, 8, 9, 10, 12 or 14, or fragments or derivatives thereof), antisense nucleic acids or small double-stranded interfering RNA;
[0179] polypeptides described herein (e.g., one or more of SEQ ID NO: 2, 3, 4, 5, 6, 7, 8, 9, 10, 12 or 14, and/or other splicing variants encoded by PDE4D, or fragments or derivatives thereof);
[0180] other polypeptides (e.g., PDE4D receptors); PDE4D binding agents;
[0181] peptidomimetics; fusion proteins or prodrugs thereof; antibodies (e.g., an antibody to a mutant PDE4D polypeptide, or an antibody to a non-mutant PDE4D polypeptide, or an antibody to a particular splicing variant encoded by PDE4D, as described above); ribozymes; other small molecules;
[0182] and other agents that alter (e.g., inhibit or antagonize) PDE4D gene expression or polypeptide activity, or that regulate transcription of PDE4D splicing variants (e.g., agents that affect which splicing variants are expressed, or that affect the amount of each splicing variant that is expressed).

[0183] More than one PDE4D therapeutic agent can be used concurrently, if desired.

[0184] The PDE4D therapeutic agent that is a nucleic acid is used in the treatment of stroke. The term, “treatment” as used herein, refers not only to ameliorating symptoms associated with the disease, but also preventing or delaying the onset of the disease, and also lessening the severity or frequency of symptoms of the disease, preventing or delaying the occurrence of a second episode of the disease or condition; and/or also lessening the severity or frequency of symptoms of the disease or condition. In the case of atherosclerosis, “treatment” also refers to a minimization or reversal of the development of plaques. The therapy is designed to alter (e.g., inhibit or enhance), replace or supplement activity of a PDE4D polypeptide in an individual. For example, a PDE4D therapeutic agent can be administered in order to upregulate or increase the expression or availability of the PDE4D gene or of specific splicing variants of PDE4D, or, conversely, to downregulate or decrease the expression or availability of the PDE4D gene or specific splicing variants of PDE4D. Upregulation or increasing expression or availability of a native PDE4D gene or of a particular splicing variant could interfere with or compensate for the expression or activity of a defective gene or another splicing variant; downregulation or decreasing expression or availability of a native PDE4D gene or of a particular splicing variant could minimize the expression or activity of a defective gene or the particular splicing variant and thereby minimize the impact of the defective gene or the particular splicing variant.

[0185] The PDE4D therapeutic agent(s) are administered in a therapeutically effective amount (i.e., an amount that is sufficient to treat the disease, such as by ameliorating symptoms associated with the disease, preventing or delaying the onset of the disease, and/or also lessening the severity or frequency of symptoms of the disease). The amount which will be therapeutically effective in the treatment of a particular individual's disorder or condition will depend on the symptoms and severity of the disease, and can be determined by standard clinical techniques. In addition, in vitro or in vivo assays may optionally be employed to help identify optimal dosage ranges. The precise dose to be employed in the formulation will also depend on the route of administration, and the seriousness of the disease or disorder, and should be decided according to the judgment of a practitioner and each patient's circumstances. Effective doses may be extrapolated from dose-response curves derived from in vitro or animal model test systems.

[0186] In one embodiment, a nucleic acid of the invention (e.g., a nucleic acid encoding a PDE4D polypeptide, such as SEQ ID NO: 1 which may optionally comprise at least one polymorphism shown in Tables 11 and 12; or another nucleic acid that encodes a PDE4D polypeptide or a splicing variant, derivative or fragment thereof, such as a nucleic acid encoding SEQ ID NO: 2, 3, 4, 5, 6, 7, 8, 9, 10, 12 or 14) can be used, either alone or in a pharmaceutical composition as described above. For example, PDE4D or a cDNA encoding the PDE4D polypeptide, either by itself or included within a vector, can be introduced into cells (either in vitro or in vivo) such that the cells produce native PDE4D polypeptide. If necessary, cells that have been transformed with the gene or cDNA or a vector comprising the gene or cDNA can be introduced (or re-introduced) into an individual affected with the disease. Thus, cells which, in nature, lack native PDE4D expression and activity, or have mutant PDE4D expression and activity, or have expression of a disease-associated PDE4D splicing variant, can be engineered to express PDE4D polypeptide or an active fragment of the PDE4D polypeptide (or a different variant of PDE4D polypeptide). In another embodiment, nucleic acid encoding the PDE4D polypeptide, or an active fragment or derivative thereof, can be introduced into an expression vector, such as a viral vector, and the vector can be introduced into appropriate cells in an animal. Other gene transfer systems, including viral and nonviral transfer systems, can be used. Alternatively, nonviral gene transfer methods, such as calcium phosphate coprecipitation, mechanical techniques (e.g., microinjection); membrane fusion-mediated transfer via liposomes; or direct DNA uptake, can also be used.

[0187] Alternatively, in another embodiment of the invention, a nucleic acid of the invention; a nucleic acid complementary to a nucleic acid of the invention; or a portion of such a nucleic acid (e.g., an oligonucleotide as described below), can be used in “antisense” therapy, in which a nucleic acid (e.g., an oligonucleotide) which specifically hybridizes to the mRNA and/or genomic DNA of PDE4D is administered or generated in situ. The antisense nucleic acid that specifically hybridizes to the mRNA and/or DNA inhibits expression of the PDE4D polypeptide, e.g., by inhibiting translation and/or transcription. Binding of the antisense nucleic acid can be by conventional base pair complementarity, or, for example, in the case of binding to DNA duplexes, through specific interaction in the major groove of the double helix.

[0188] An antisense construct of the present invention can be delivered, for example, as an expression plasmid as described above. When the plasmid is transcribed in the cell, it produces RNA that is complementary to a portion of the mRNA and/or DNA that encodes PDE4D polypeptide. Alternatively, the antisense construct can be an oligonucleotide probe that is generated ex vivo and introduced into cells; it then inhibits expression by hybridizing with the mRNA and/or genomic DNA of PDE4D. In one embodiment, the oligonucleotide probes are modified oligonucleotides that are resistant to endogenous nucleases, e.g., exonucleases and/or endonucleases, thereby rendering them stable in vivo. Exemplary nucleic acid molecules for use as antisense oligonucleotides are phosphoramidate, phosphothioate and methylphosphonate analogs of DNA (see also U.S. Pat. Nos. 5,176,996; 5,264,564; and 5,256,775). Additionally, general approaches to constructing oligomers useful in antisense therapy are also described, for example, by Van der Krol et al. ((1988) Biotechniques 6: 958-976); and Stein et al. ((1988) Cancer Res 48: 2659-2668). With respect to antisense DNA, oligodeoxyribonucleotides derived from the translation initiation site, e.g., between the −10 and +10 regions of PDE4D sequence, are preferred.

[0189] To perform antisense therapy, oligonucleotides (mRNA, cDNA or DNA) are designed that are complementary to mRNA encoding PDE4D. The antisense oligonucleotides bind to PDE4D mRNA transcripts and prevent translation. Absolute complementarity, although preferred, is not required, a sequence “complementary” to a portion of an RNA, as referred to herein, indicates that a sequence has sufficient complementarity to be able to hybridize with the RNA, forming a stable duplex; in the case of double-stranded antisense nucleic acids, a single strand of the duplex DNA may thus be tested, or triplex formation may be assayed. The ability to hybridize will depend on both the degree of complementarity and the length of the antisense nucleic acid, as described in detail above. Generally, the longer the hybridizing nucleic acid, the more base mismatches with an RNA it may contain and still form a stable duplex (or triplex, as the case may be). One skilled in the art can ascertain a tolerable degree of mismatch by use of standard procedures. The oligonucleotides used in antisense therapy can be DNA, RNA, or chimeric mixtures or derivatives or modified versions thereof, single-stranded or double-stranded. The oligonucleotides can be modified at the base moiety, sugar moiety, or phosphate backbone, for example, to improve stability of the molecule, hybridization, etc. The oligonucleotides can include other appended groups such as peptides (e.g., for targeting host cell receptors in vivo), or agents facilitating transport across the cell membrane (see, e.g., Letsinger et al. (1989) Proc. Natl. Acad. Sci. USA 86: 6553-6556; Lemaitre et al., (1987), Proc. Natl. Acad. Sci. USA 84: 648-652; PCT International Publication No. WO88/09810) or the blood-brain barrier (see, e.g., PCT International Publication No. WO89/10134), or hybridization-triggered cleavage agents (see, e.g., Krol et al. (1988) BioTechniques 6: 958-976) or intercalating agents. (See, e.g., Zon, (1988), Pharm. Res. 5: 539-549). To this end, the oligonucleotide may be conjugated to another molecule (e.g., a peptide, hybridization triggered cross-linking agent, transport agent, hybridization-triggered cleavage agent).

[0190] The antisense molecules are delivered to cells that express PDE4D in vivo. A number of methods can be used for delivering antisense DNA or RNA to cells; e.g., antisense molecules can be injected directly into the tissue site, or modified antisense molecules, designed to target the desired cells (e.g., antisense linked to peptides or antibodies that specifically bind receptors or antigens expressed on the target cell surface) can be administered systematically. Alternatively, in another embodiment, a recombinant DNA construct is utilized in which the antisense oligonucleotide is placed under the control of a strong promoter (e.g., pol III or pol II). The use of such a construct to transfect target cells in the patient results in the transcription of sufficient amounts of single stranded RNAs that will form complementary base pairs with the endogenous PDE4D transcripts and thereby prevent translation of the PDE4D mRNA. For example, a vector can be introduced in vivo such that it is taken up by a cell and directs the transcription of an antisense RNA. Such a vector can remain episomal or become chromosomally integrated, as long as it can be transcribed to produce the desired antisense RNA. Such vectors can be constructed by recombinant DNA technology methods standard in the art and described above. For example, a plasmid, cosmid, YAC or viral vector can be used to prepare the recombinant DNA construct that can be introduced directly into the tissue site. Alternatively, viral vectors can be used which selectively infect the desired tissue, in which case administration may be accomplished by another route (e.g., systemically).

[0191] Methods of modulating PDE4D expression by administering an RNA inhibitor of the activity of the target protein are also possible. The term “RNA inhibitor” refers to an inhibitory RNA that silences expression of the target protein by RNA interference (McManus, M. T. and Sharp, P. A., 2002. Nat. Rev. Genet. 3: 737-47; Hannon, G. J., 2002. Nature 418: 244-51; Paddison, P. J. and Hannon, G. J., 2002. Cancer Cell 2: 17-23). RNA interference is conserved throughout evolution, from C. elegans to humans, and is believed to function in protecting cells from invasion by RNA viruses. When a cell is infected by a dsRNA virus, the dsRNA is recognized and targeted for cleavage by an RNaseIII-type enzyme termed Dicer. The Dicer enzyme “dices” the RNA into short duplexes of 21 nucleotides, termed short-interfering RNAs or siRNAs, composed of 19 nucleotides of perfectly paired ribonucleotides with two unpaired nucleotides on the 3′ end of each strand. These short duplexes associate with a multiprotein complex termed RISC, and direct this complex to mRNA transcripts with sequence similarity to the siRNA. As a result, nucleases present in the RISC complex cleave the mRNA transcript, thereby abolishing expression of the gene product. In the case of viral infection, this mechanism would result in destruction of viral transcripts, thus preventing viral synthesis. Since the siRNAs are double-stranded, either strand has the potential to associate with RISC and direct silencing of transcripts with sequence similarity.

[0192] Recently, it was determined that gene silencing could be induced by presenting the cell with the siRNA, mimicking the product of Dicer cleavage (Elbashir, S. M., et al., 2001. Nature 411: 494-8; Elbashir, S. M., et al., 2001. Genes Dev. 15: 188-200). Synthetic siRNA duplexes maintain the ability to associate with RISC and direct silencing of mRNA transcripts, thus providing researchers with a powerful tool for gene silencing in mammalian cells. Yet another method to introduce the dsRNA for gene silencing is shRNA, for short hairpin RNA (Paddison, P. J., et al., 2002. Genes Dev. 16: 948-58; Brummelkamp, T. R., et al., 2002 Science 296: 550-3; Sui, G., et al., 2002. Proc. Natl. Acad. Sci. U.S.A. 99: 5515-20). In this case, a desired siRNA sequence is expressed from a plasmid (or virus) containing an “shRNA” gene having an inverted repeat with an intervening loop sequence to form a hairpin structure. The resulting shRNA transcript containing the hairpin is subsequently processed by Dicer to produce siRNAs for silencing. Plasmid-based shRNAs can be expressed stably in cells, allowing long-term gene silencing in cells, or even in animals (McCaffrey, A. P., et al., 2002. Nature 418: 38-9; Xia, H., et al., 2002. Nat. Biotech. 20: 1006-10; Lewis, D. L., et al., 2002. Nat. Genetics 32: 107-8; Rubinson, D. A., et al., 2003. Nat. Genetics 33: 401-6; Tiscomia, G., et al., (2003) Proc. Natl. Acad. Sci. U.S.A. 100: 1844-8). RNA interference has been successfully used therapeutically to protect mice from fulminant hepatitis (Song, E., et al., 2003. Nat. Medicine 9: 347-51).

[0193] Endogenous PDE4D expression can be also reduced by inactivating or “knocking out” PDE4D or its promoter using targeted homologous recombination (e.g., see Smithies et al. (1985) Nature 317: 230-234; Thomas & Capecchi (1987) Cell 51: 503-512; Thompson et al. (1989) Cell 5: 313-321). For example, a mutant, non-functional PDE4D (or a completely unrelated DNA sequence) flanked by DNA homologous to the endogenous PDE4D (either the coding regions or regulatory regions of PDE4D) can be used, with or without a selectable marker and/or a negative selectable marker, to transfect cells that express PDE4D in vivo. Insertion of the DNA construct, via targeted homologous recombination, results in inactivation of PDE4D. The recombinant DNA constructs can be directly administered or targeted to the required site in vivo using appropriate vectors, as described above. Alternatively, expression of non-mutant PDE4D can be increased using a similar method: targeted homologous recombination can be used to insert a DNA construct comprising a non-mutant, functional PDE4D (e.g., a gene having SEQ ID NO: 1 which may optionally comprise at least one polymorphism shown in Tables 11 and 12), or a portion thereof, in place of a mutant PDE4D in the cell, as described above. In another embodiment, targeted homologous recombination can be used to insert a DNA construct comprising a nucleic acid that encodes a PDE4D polypeptide variant that differs from that present in the cell.

[0194] Alternatively, endogenous PDE4D expression can be reduced by targeting deoxyribonucleotide sequences complementary to the regulatory region of PDE4D (i.e., the PDE4D promoter and/or enhancers) to form triple helical structures that prevent transcription of PDE4D in target cells in the body. (See generally, Helene, C. (1991) Anticancer Drug Des., 6 (6): 569-84; Helene, C., et al. (1992) Ann, N.Y. Acad. Sci., 660: 27-36; and Maher, L. J. (1992) Bioassays 14 (12): 807-15). Likewise, the antisense constructs described herein, by antagonizing the normal biological activity of one of the PDE4D proteins, can be used in the manipulation of tissue, e.g., tissue differentiation, both in vivo and/or ex vivo tissue cultures. Furthermore, the anti-sense techniques (e.g., microinjection of antisense molecules, or transfection with plasmids whose transcripts are anti-sense with regard to a PDE4D mRNA or gene sequence) can be used to investigate role of PDE4D in developmental events, as well as the normal cellular function of PDE4D in adult tissue. Such techniques can be utilized in cell culture, but can also be used in the creation of transgenic animals.

[0195] In yet another embodiment of the invention, other PDE4D therapeutic agents as described herein can also be used in the treatment or prevention of stroke. The therapeutic agents can be delivered in a composition, as described above, or by themselves. They can be administered systemically, or can be targeted to a particular tissue. The therapeutic agents can be produced by a variety of means, including chemical synthesis; recombinant production; in vivo production (e.g., a transgenic animal, such as U.S. Pat. No. 4,873,316 to Meade et al.), for example, and can be isolated using standard means such as those described herein.

[0196] A combination of any of the above methods of treatment (e.g., administration of non-mutant PDE4D polypeptide in conjunction with antisense therapy targeting mutant PDE4D mRNA; administration of a first splicing variant encoded by PDE4D in conjunction with antisense therapy targeting a second splicing encoded by PDE4D), can also be used.

[0197] The invention will be further described by the following non-limiting examples. The teachings of all publications cited herein are incorporated herein by reference in their entirety.

### EXAMPLES

### Example 1

### PDE4D Variations and Haplotypes Increase Risk for Stroke

Icelandic Stroke Patients and Phenotype Characterization

[0198] A population-based list containing 2543 Icelandic stroke patients, diagnosed from 1993 through 1997, was derived from two major hospitals in Iceland and the Icelandic Heart Association (the study was approved by the Icelandic Data Protection Commission of Iceland and the National Bioethics Committee). Patients with hemorrhagic stroke represented 6% of all patients (patients with the Icelandic type of hereditary cerebral hemorrhage with amyloidosis and patients with subarachnoid hemorrhage were excluded). Ischemic stroke accounted for 67% of the total patients and TIAs 27%. The distribution of stroke suptypes in this study is similar to that reported in other Caucasian populations (Mohr, J. P., et al., Neurology, 28: 754-762 (1978); L. R. Caplan, In Stroke, A Clinical Approach (Butterworth-Heinemann, Stoneham, Mass., ed 3, (1993)).

[0199] The list of approximately 2000 living patients was run through our computerized genealogy database. A comprehensive genealogy database that has been established at deCODE genetics was used to cluster the patients in pedigrees. Each version of the computerized genealogy database was reversibly encrypted by the Data Protection Commission of Iceland before arriving at the laboratory (Gulcher, J. R., et al., Eur. J. Hum. Genet. 8: 739 (2000)). The database uses a patient list, with encrypted personal identifiers, as input, and recursive algorithms to find all ancestors in the database who are related to any member on the input list within a given number of generations back (Gulcher, J. R., and Stefansson, K., Clin. Chem. Lab. Med. 36: 523 (1998)) covering the whole Icelandic nation. The cluster function then searches for ancestors who are common to any two or more members of the input list. One hundred and seventy-nine families with two or more living patients were chosen for the study with a total of 476 patients connected within 6 meioses (6 meioses connect second cousins). Informed consent was obtained from all patients and their relatives whose DNA samples were used in the linkage scan. The mean separation between affected pairs is 4.8 meioses. Of the patients selected for the study 73% had ischemic strokes, 23% TIAs and 4% hemorrhagic strokes.

[0200] In the selected families, hemorrhagic stroke patients clustered with ischemic stroke and TIA patients, and there were no families with a striking preponderance of hemorrhagic stroke or of the subtypes of ischemic stroke. Patients with ischemic stroke were reclassified according to the TOAST (Trial of Org 10172 in Acute Stroke Treatment) sub-classification system for stroke (Adams, H. P., Jr., et al., Stroke, 24: 34-41 (1993)). This system includes five categories: (1) large-artery atherosclerosis, (2) cardioembolism, (3) small-artery occlusion (lacune), (4) stroke of other determined etiology and (5) stroke of undetermined etiology. The diagnoses were based on clinical features and on data from ancillary diagnostic studies. Patients defined with large-artery atherosclerosis had clinical and brain imaging findings of cerebral cortical dysfunction and either significant (>70%) stenosis (this is a stricter criteria than used in TOAST where 50% stenosis is the cut-off) or occlusion of a major brain artery or branch cortical artery. Potential sources of cardiogenic embolism were excluded. The category cardioembolism included patients with at least one cardiac source for an embolus and potential large-artery sources of thromobosis and embolism was eliminated. Patients with small-artery occlusion had one of the traditional clinical lacunar syndromes and no evidence of cerebral cortical dysfunction. Potential cardiac source of embolus and stenosis >70% in an ipsilateral extracranial artery was excluded. The category, acute stroke of other determined etiology, included patients with rare causes of stroke and patients with two or more potential causes of stroke. If the causes of stroke could not be determined despite extensive evaluation patients were included in the category stroke of undetermined etiology. FIG. 1 displays two pedigrees each affected by several of the stroke subtypes, including hemorrhagic stroke. Apparently what is inherited in stroke is the broadly defined phenotype.

Genome-Wide Scan

[0201] A genome-wide scan was performed using a framework map of about 1000 microsatellite markers. The DNA samples were genotyped using approximately 1000 fluorescently labelled primers. A microsatellite screening set based in part on the ABI Linkage Marker (v2) screening set and the ABI Linkage Marker (v2) intercalating set in combination with 500 custom-made markers were developed. All markers were extensively tested for robustness, ease of scoring, and efficiency in 4× multiplex PCR reactions. In the framework marker set, the average spacing between markers was approximately 4 cM with no gaps larger than 10 cM. Marker positions were obtained from the Marshfield map, except for a three-marker putative inversion on chromosome 8 (Jonsdottir, G. M., et al., Am. J. Hum. Genet., 67 (Suppl. 2): 332 (2000); Yu, A., et al., Am. J. Hum. Genet. 67 (Suppl. 2): 10 (2000). The PCR amplifications were set up, run and pooled on Perkin Elmer/Applied Biosystems 877 Integrated Catalyst Thermocyclers with a similar protocol for each marker. The reaction volume used was 5 μl and for each PCR reaction 20 ng of genomic DNA was amplified in the presence of 2 pmol of each primer, 0.25 U AMPLITAQ GOLD (DNA polymerase; trademark of Roche Molecular Systems), 0.2 mM dNTPs and 2.5 mM MgCl2 (buffer was supplied by manufacturer). The PCR conditions used were 95° C. for 10 minutes, then 37 cycles of 15 s at 94° C., 30 s at 55° C. and 1 min at 72° C. The PCR products were supplemented with the internal size standard and the pools were separated and detected on Applied Biosystems model 377 Sequencer using v3.0 GENESCAN (peak calling software; trademark of Applied Biosystems). Alleles were called automatically with the TRUEALLELE (computer program for alleles identification; trademark of Cybergenetics, Inc.) program, and the program, DECODE-GT (computer editing program that works downstream of the TRUEALLELE program; trademark of deCODE genetics), was used to fractionate according to quality and edit the called genotypes (Palsson, B., et al., Genome Res. 9: 1002 (1999)). At least 180 Icelandic controls were genotyped to derive allelic frequencies.

[0202] A total of 476 patients and 438 relatives were genotyped. The data was analyzed and the statistical significance determined by applying affecteds-only allele-sharing methods (which does not specify any particular inheritance model) implemented in the ALLEGRO (computer program for multipoint linkage analysis; trademark of deCODE genetics) program that calculates lod scores based on multipoint calculations. Our baseline linkage analysis uses the Spairs scoring function (Kruglyak, L., et al., Am. J. Hum. Genet., 58: 1347 (1996)), the exponential allele-sharing model (Kong, A. and Cox, N.J., Am. J. Hum. Genet., 61: 1179 (1997)), and a family weighting scheme which is halfway, on the log scale, between weighting each affected pair equally and weighting each family equally. In the analysis we treat all genotyped individuals who are not affected as “unknown”. All linkage analyses in this paper were performed using multipoint calculation with the program ALLEGRO (deCODE genetics) (Gudbjartsson, D. F., et al., Nat. Genet. 25: 12 (2000)).

[0203] The allele sharing lod scores for the genome scan using the framework map showed three regions that achieved a lod score above 1.0. Two of these regions are on chromosome 5q. The first peak is at approximately 69 cM with a lod score of 2.00. The second peak is at 99 cM with a lod score of 1.14. The third region is on chromosome 14q at 55 cM with a lod score of 1.24.

[0204] The information for linkage at the 5q locus was increased by genotyping an additional 45 markers over a 45 cM segment which spanned both peaks. The information used here is defined by Nicolae (D. L. Nicolae, Thesis, University of Chicago (1999)) and has been demonstrated to be asymptotically equivalent to a classical measure of the fraction of missing information (Dempster, A. P., et al., J. R. Statist. Soc. B, 39: 1 (1977)). While the lod score at the second peak dropped slightly to around 1.05, the lod score at the first peak increased to 3.39. However, close inspection of our results suggested that not only does the Marshfield genetic map lack resolution (many markers assigned the same map location), but also there may be some errors in their order. As a result, the genetic length of the region estimated using our material was substantially greater than what is reported. By modifying the ALLEGRO (deCODE genetics) program, we applied the EM algorithm to our data to estimate the genetic distances between markers. We found that our estimate of the genetic length of the region was substantially longer than that given in the Marshfield map. This indicates a problem with marker order because, in general, incorrect marker order leads to an increased number of apparent crossovers and increases the apparent genetic length.

Physical and Genetic Mapping

[0205] The marker order and inter-marker distances were improved by constructing high density physical and genetic maps over a 20 cM region between markers D5S474 and D5S2046. A combination of data from coincident hybridizations of BAC membranes using a high density of STSs and the Fingerprinting Contig database was used to build large contigs of BACs from the RPCI-11 library. The order of the linkage markers was also confirmed by high-resolution genetic mapping using the stroke families supplemented with over 112 other large nuclear families. High resolution genetic mapping was used both to anchor and place in order contigs found by physical mapping as well as to obtain accurate inter-marker distances for the correctly ordered markers. Data from 112 Icelandic nuclear families (sibships with their parents, containing from two to seven siblings) were analyzed together with the nuclear families available within the stroke pedigrees. For the purpose of genetic mapping the 112 nuclear families alone provide 588 meioses, and the total number of meioses available for mapping was over 2000. By comparison, the Marshfield genetic map was constructed based on 182 meioses. The large number of meiotic events within our families provides the ability to map markers to the resolution of 0.5 to 1.0 cM. Combining this information with the physical map resulted in a highly reliable order of markers and inter-marker distances within this 20 cM region. Linkage markers common to the genetic and physical maps were used to anchor and place in order four of the physically mapped contigs. By integrating the genetic and physical maps a most likely order of 30 polymorphic markers was derived.

[0206] BAC contigs were generated by a method that combines coincident primer hybridization with data mining. The RPCI-11 human male BAC library segments 1 & 2 (Pieter de Jong, Children's Hospital Oakland Research Institute) containing about 200,000 clones with a 12× coverage, were gridded using a 6×6 double offset pattern in 23 cm×23 cm membranes with a BioGrid robot (Biorobotics Ltd., Cambridge, UK). Initially, hybridizations were performed with markers in the region of interest according to their location in the Weizmann Institute Unified Database. Primer sequences were analyzed and discarded according to their content of known repeats, E. coli and vector sequences (the analysis was performed using software developed at deCODE genetics). One hundred and fifty markers in the region (30 polymorphic markers used in linkage and 120 generated from STSs) separated by an average of 130 kb were used. The selected markers were used to generate two ³²P labelled probes, F that contained the pooled forward primers and R that contained the pooled reverse primers. Reading of positive signals was performed automatically from digitized images of resulting autoradiograms by informatics tools developed at deCODE genetics. The coincident signals in both hybridizations were selected as positive clones. A set of overlapping clones was assembled through a combination of hybridization and BAC fingerprint walking. Fingerprints of positive clones were analyzed using the FPC database developed at the Sanger Center. Data from FPC contigs prebuilt with a cutoff of 3e-12 and from sequence datamining was integrated with the hybridization results. BACs in the region detected by data mining and hybridization were re-arrayed using a Multiprobe IIex robot (Packard, Meriden, Conn.). Small membranes (8 cm×12 cm) were gridded in 6×6 double offset pattern and individually hybridized with the markers of interest. Positive patterns were transferred using transparencies to an Excel file containing macros to provide BAC to marker associations. A visual map was generated by combining the hybridization, fingerprinting and sequence data. New markers were generated from BAC end sequences to close the gap. After several rounds of hybridization positive BACs were assembled into 7 contigs covering approximately 20 Mb. Thirty of the polymorphic markers used in linkage were assigned to four of the contigs. Estimation of contig lengths and distance between markers assigned to them was based on the FPC program.

[0207] Twenty-seven of our 30 linkage markers mapped to three contigs in the October 2000 release from UCSC, the UC Santa Cruz (UCSC) draft assembly, found on the world wide web at genome.ucsc.edu. The marker order within the contigs is in agreement with our order with the exception of two markers. Although the UCSC assemblies are improving, some contigs have incorrect order, orientation, or contig assembly. We believe that high resolution genetic mapping and perhaps focused hybridization experiments are still necessary to confirm accuracy of sequence assemblies. In addition, high resolution genetic mapping provides better estimates of inter-marker genetic distances that are also important for linkage analysis (Halpern, J. and Whittermore, A. S., Hum. Hered. 49: 194 (1999); Daw, E. W., et al., Genet. Epidemiol. 19: 366 (2000)).

Statistical Methods for Linkage Analysis

[0208] Multipoint, affected-only allele-sharing methods were used in the analyses to assess evidence for linkage. All results, both the LOD-score and the non-parametric linkage (NPL) score, were obtained using the program Allegro (Gudbjartsson et al., Nat. Genet. 25: 12-3 (2000)). Our baseline linkage analysis, as previously described (Gretarsdottir et al., Am J Hom Genet, 70: 593-603 (2002)), uses the Sₚₐᵢᵣₛ scoring function (Whittemore, A. S., Halpern, J., Biometrics 50: 118-27 (1994); Kruglyak L, et al., Am J Hum Genet 58: 1347-63 (1996)), the exponential allele-sharing model (Kong, A. and Cox, N.J. Am J Hum Genet 61: 1179-88 (1997)) and a family weighting scheme that is halfway, on the log-scale, between weighting each affected pair equally and weighting each family equally. The information measure we use is part of the Allegro program output and the information value equals zero if the marker genotypes are completely uninformative and equals one if the genotypes determine the exact amount of allele sharing by decent among the affected relatives (Gretarsdottir et al., Am. J. Hom. Genet, 70: 593-603, (2002)). We computed the P-values two different ways and here report the less significant result. The first P-value was computed on the basis of large sample theory; the distribution of Zᵢᵣ=√(2[logₑ(10)LOD]) approximates a standard normal variable under the null hypothesis of no linkage (Kong, A. and Cox, N.J., Am J Hum Genet 61: 1179-88 (1997)). The second P-value was calculated by comparing the observed LOD-score with its complete data sampling distribution under the null hypothesis (Gudbjartsson et al., Nat. Genet. 25: 12-3, (2000)). When the data consist of more than a few families, as is the case here, these two P-values tend to be very similar.

Final Linkage Results and Localization

[0209] Linkage analysis including genotypes from the higher density markers using the deCODE marker order resulted in a lod score of 4.40 (P=3.9×10⁻⁶) on chromosome 5q12 at the marker D5S2080. The reported P value is part of the output of the ALLEGRO (deCODE genetics) program which was developed at deCODE and has become a standard linkage program worldwide over the last 3 years (Gudbjartsson et al., Nat. Genet. 25: 12-3, (2000)). We have given it to over 200 academic departments around the world free of charge and it is widely used. The locus has been designated as STRK1. With the addition of these extra markers, it was possible to narrow down the region to a segment less than 6 cM, from D5S1474 to D5S398, as defined by one drop in lod.

[0210] To further investigate the contribution of this susceptibility locus to stroke, a range of parametric models were fitted to the data. However, all analyses were still affecteds only in the sense that individuals were either classified as affecteds or having unknown disease status. A lod score of 4.08 was obtained with a dominant model where the allele frequency of the susceptibility gene was assumed to be 5% and carriers of the alteration were assumed to have seven-fold the risk of a non-carrier. By inspecting the individual families, no obvious correlation was seen between families that contribute positively to the linkage results with the prevalence of hypertension, diabetes or hyperlipidemias. When the data were reanalyzed with the hemorrhagic stroke patients removed, the allele sharing lod score increased to 4.86 at D5S2080. Although this 0.46 increase in log score suggests that STRK1 is involved primarily in ischemic stroke and TIAs, it is not statistically significant based on simulations (one sided P equals 0.09). In order to assess whether such a change in lod score would be likely to occur by chance we selected 1000 random sets of 22 patients whose status we then changed to “unknown” in an analysis. The P value we present is the fraction of the 1000 simulations which produce a lod score increase at the peak locus equal to or greater than that which we observed by changing the affection status of the 22 hemorrhagic stroke patients to “unknown”.

Identification of Allelic Association

[0211] All microsatellite markers in the approx. 6 cM interval (markers from D5S398 to D5S1474) were analyzed with respect to allelic association.

Microsatellite Allelic Association

[0212] We initially genotyped 864 Icelandic stroke patients and 908 controls using a total of 98 microsatellite markers. These markers are distributed over a region of approximately 11 Mb. The region is centered on our linkage peak and corresponds to the 2 LOD drop. The density of markers is greater in the central 3.7 Mb portion of the region, which includes the 1 LOD drop, with an average spacing of one marker every 53 kb. We have designated this central region, which is flanked by markers D5S1474 and D5S398, as the STRK1 interval. Three markers, AC027322-5, D5S2121 and AC008818-1, showed a difference in allelic frequency between patients and controls with p-values less than 0.01 (Table 1). Correcting for the relatedness of the Icelandic patients had little impact on the p-values, but after correcting for the number of markers and alleles tested none of these p-values were significant (Table 1).

[0213] We had previously observed that our linkage peak increased, albeit not significantly, when excluding the hemorrhagic stroke patients. We therefore tested only those patients with ischemic stroke or TIA for association to the markers. In addition, our ischemic stroke and TIA patients have been sub-classified according to the TOAST research criteria and we also repeated the association analysis separately for patients with the three TOAST subcategories: cardiogenic, carotid (greater than 70% stenosis) and small vessel occlusive disease. Lastly, we tested the combination of patients with cardiogenic and carotid stroke, since these categories of stroke are most clearly related to atherosclerosis. The results for each of these association studies are presented in Table 1. Three of the tests, one for cardiogenic stroke (AC008818-1), one for carotid stroke (DG5S397), and one for the combination of carotid and cardiogenic stroke (AC008818-1) were significant even after correcting for multiple testing (Table 1). The marker DG5S397 is located within the PDE4D gene and AC008818-1 is in the 5′ end of PDE4D and in the overlapping gene Prostate androgen-regulated transcript (PART1) whose transcript is on the other strand going in the opposite direction. PDE4D is an important regulator of intracellular levels of cAMP and is expressed widely. PART1 encodes a putative protein with unknown function predominantly expressed in the prostate gland and in several cancer cell lines. Physical locations of all genotyped markers and PDE4D and PART1 exons are available in Table 2C. The association results for the combination of carotid and cardiogenic stroke were particularly striking with an allele frequency of 35.5% in patients for allele 0 (the CEPH reference allele) of marker AC008818-1 versus 25.5% in controls. The unadjusted p-value for this marker is 0.0000015, and after adjusting for multiple testing of markers is 0.00025 (Table 1). This remains significant even after adjusting for the several phenotypes studied. The risk of this allele to the other alleles of this marker, assuming the multiplicative model Terwilliger, J. D. & Ott, J. A haplotype-based ‘haplotype relative risk’ approach to detecting allelic associations. Hum Hered 42, 337-46 (1992) and Falk, C. T. & Rubinstein, P. Haplotype relative risks: an easy reliable way to construct a proper control sample for risk calculations. Ann Hum Genet 51 (Pt 3), 227-33 (1987), was estimated to be 1.60, and the corresponding population attributable risk was 25%.

[0214] Thus, the strong association signals from our initial microsatellite association studies helped to focus our attention on the STRK1 interval and, in particular, to the PDE4D gene region.

TABLE 1
Microsatellite allelic association analysis of the two-lod drop of the STRK1 locus.
All microsatellites that show association with a p-value less than 0.01 for all stroke,
all stroke excluding hemorrhagic stroke, cardiogenic stroke, carotid stroke, small
vessel disease and the combination of cardiogenic and carotid stroke

| | | | | | # | Aff. | # | Ctrl. |
|---|---|---|---|---|---|---|---|---|
| Phenotype | Marker | Allele | p-value | RR | Aff. | % | Ctrl | % |
| All | | | | | | | | |
| | AC027322-5 | 10 | 0.001 | 3.34 | 787 | 1.90 | 779 | 0.6 |
| | D5S2121 | −2 | 0.0027 | 2.19 | 824 | 2.7 | 870 | 1.3 |
| | AC008818-1 | 0 | 0.0045 | 1.25 | 815 | 29.9 | 891 | 25.5 |
| All patients - | | | | | | | | |
| excluding | | | | | | | | |
| hemorrhagic | | | | | | | | |
| stroke | | | | | | | | |
| | AC027322-5 | 10 | 0.00052 | 3.56 | 740 | 20 | 779 | 0.6 |
| | D5S2121 | −2 | 0.0023 | 2.23 | 774 | 2.8 | 870 | 1.3 |
| | AC008818-1 | 0 | 0.0062 | 1.24 | 764 | 29.9 | 891 | 25.5 |
| Cardiogenic | | | | | | | | |
| stroke | | | | | | | | |
| | AC008818-1 | 0 | 0.000054* | 1.60 | 216 | 35.4 | 891 | 25.5 |
| | D5S1990 | 20 | 0.00053 | 2.18 | 223 | 7.9 | 879 | 3.8 |
| | D5S2089 | −10 | 0.0027 | 2.22 | 219 | 5.9 | 813 | 2.8 |
| | D5S1359 | 2 | 0.0044 | 1.39 | 214 | 36.0 | 777 | 28.8 |
| | AC016604-2 | 0 | 0.0048 | 1.44 | 170 | 51.8 | 446 | 42.7 |
| | AC008804-1 | 0 | 0.0068 | 1.52 | 128 | 36.3 | 367 | 27.3 |
| | AC022125-3 | 0 | 0.0077 | 1.36 | 223 | 36.8 | 775 | 30.0 |
| | DG5S2066 | 0 | 0.0095 | 1.80 | 166 | 92.5 | 501 | 87.2 |
| | DG5S2039 | 9 | 0.0084 | 2.00 | 167 | 8.7 | 491 | 4.6 |
| | D5S647 | −6 | 0.0091 | 2.43 | 199 | 3.8 | 789 | 1.6 |
| Carotid stroke | | | | | | | | |
| | DG5S397 | 4 | 0.00024* | 1.70 | 124 | 65.7 | 577 | 53.0 |
| | DG5S2056 | 12 | 0.0009 | 3.33 | 80 | 8.8 | 464 | 2.8 |
| | AC008818-1 | 0 | 0.001 | 1.61 | 125 | 35.6 | 891 | 25.5 |
| | DG5S2039 | −3 | 0.003 | 1.62 | 96 | 45.8 | 491 | 34.3 |
| | DG5S2045 | 0 | 0.0051 | 1.80 | 55 | 57.3 | 339 | 42.6 |
| | DG5S818 | 6 | 0.0079 | 1.50 | 111 | 63.1 | 563 | 53.3 |
| | AC016604-3 | 4 | 0.0072 | 1.53 | 99 | 40.9 | 645 | 31.2 |
| Small | | | | | | | | |
| vessel disease | | | | | | | | |
| | D5S1359 | 2 | 0.0085 | 1.41 | 157 | 36.3 | 777 | 28.8 |
| | D5S2080 | 2 | 0.0092 | 1.38 | 153 | 54.6 | 885 | 46.5 |
| | D5S2121 | −2 | 0.0059 | 2.93 | 152 | 3.6 | 870 | 1.3 |
| Combined | | | | | | | | |
| cardiogenic & | | | | | | | | |
| carotid stroke | | | | | | | | |
| | AC008818-1 | 0 | 0.0000015* | 1.60 | 341 | 35.5 | 891 | 25.5 |
| | AC008833-6 | 0 | 0.0026 | 1.35 | 335 | 70.3 | 868 | 63.8 |
| | DG5S2066 | 0 | 0.0032 | 1.74 | 258 | 92.3 | 501 | 87.2 |
| | DG5S397 | 4 | 0.009 | 1.29 | 345 | 59.3 | 577 | 53.0 |
| | D5S2121 | −2 | 0.0081 | 2.39 | 336 | 3.0 | 870 | 1.3 |
| *significant after adjusting for multiple testing | | | | | | | | |
| Alleles #'s: For SNP alleles A = 0, C = 1, G = 2, T = 3; for microsatellite alleles: the CEPH sample 1347-02 (CEPH genomics repository) is used as a reference, the lower allele of each microsatellite in this sample is set at 0 and all other alleles in other samples are numbered accordingly in relation to this reference. | | | | | | | | |
| # Thus allele1 is 1 bp longer than the lower allele in the CEPH sample 1347-02, allele 2 is 2 bp longer than the lower allele in the CEPH sample 1347-02, allele 3 is 3 bp longer than the lower allele in the CEPH sample 1347-02, allele 4 is 4 bp longer than the lower allele in the CEPH sample 1347-02, allele −1 is 1 bp shorter than the lower allele in the CEPH sample 1347-02, allele −2 is 2 bp shorter than the lower allele in the CEPH sample 1347-02, and so on. | | | | | | | | |
| # Note that this same CEPH sample is a standard that is widely used throughout the world for calibration and comparison of alleles. | | | | | | | | |

[0215] AC008818-1 amplimer:

| | |
|---|---|
| TGCTTGGTGAAGGAATAGCCACCCCAGAGAAGGAGTATGGACTTCTA | (SEQ ID NO: 86) |
| TACACAATCATTCATTCATTCATTCATTCATTCATTCATTCATTCATTCACTA | |
| CTCATGCATGATCTTTGTCCTTATCTTCCTCCACTGTCACATGAATACCCACC | |
| CACTGCACCTACCTGCTTCCTATTCCTGAGAACCCAGGCTC | |

[0216] AC008818-1, allele 0 is the same allele as the minimum allele observed in CEPH 1347-O₂, family 137, individual 02.

[0217] Swedish patients have also been genotyped and microsatellite single and multimarker association has been analyzed using the E-M algorithm. A total number of 943 Swedish patients (stroke patients and patients with carotid stenosis) and 322 Swedish controls were analyzed (results shown in Table 2A). At least three haplotypes were more common in patients compared to controls, confirming in a second population that PDE4D shows association to stroke.

TABLE 2A
Swedish Patient Association

| | | | All Frq | All Frq | # | # |
|---|---|---|---|---|---|---|
| Markers | Alleles | pAllelic | Aff | Ctrl | aff | ctrl |
| Swedish patients | | | | | | |
| (n = 943) | | | | | | |
| D5S2000 | 2 | 0.0024 | | | 912 | 318 |
| (Sw 2) AC022125-3 | 0 0 2 0 | 0.006 | 0.035 | 0.01 | 717 | 284 |
| AC008833-6 D5S2000 | | | | | | |
| D5S2091 | | | | | | |
| (Sw-1) AC008804-2 | −2 4 −2 10 | 0.0028 | 0.057 | 0.05 | 672 | 113 |
| D17-H D17-G D5S2080 | | | | | | |
| AC008804-2 | −4 0 −2 | 0.0037 | 0.056 | 0.03 | 700 | 123 |
| D17-H D17-G | | | | | | |

Screening for Polymorphisms in PDE4D

[0218] We next considered whether a functional variant in the PDE4D gene might be the cause of our observed microsatellite association. We matched public domain ESTs and our own RT-PCR and RACE transcripts to our sequence of the STRK1 interval. We defined new alternative PDE4D transcripts, which together with previously known transcripts indicated that the PDE4D gene contains 22 exons over at least 1.5 Mb and overlaps with PART1. The PDE4D gene encodes eight protein isoforms and has at least seven promoters. All isoforms identified have an identical C-terminal catalytic domain but differ at the N-terminal regulatory domain (FIG. 2).

[0219] We then attempted to identify mutations by sequencing all known PDE4D exons (including the overlapping PART1 exons) and, on average, 100 bp of their flanking introns in 188 patients and 94 controls. Forty-six polymorphisms were identified; 44 SNPs and two intronic deletions. Only two of the polymorphisms, both SNPs, were found within the coding exons of the PDE4D gene, which is consistent with the extraordinary lack of variation that others have reported for all four PDE4 classes (Houslay, M. D. & Adams, D. R. PDE4 cAMP phosphodiesterases: modular enzymes that orchestrate signalling cross-talk, desensitization and compartmentalization. Biochem J 370, 1-18 (2003). The two coding SNPs were typed for additional patients and controls. However, these SNPs did not show significant association to stroke (Table 2B). Therefore, if a functional variant conferring risk for stroke exists in the PDE4D gene, it may be within regulatory regions affecting transcription, splicing, message stability, or message transport of one or more isoforms, or in exons that we have not yet identified.

TABLE 2B
Frequency of PDE4D coding mutations.

| | AA | PDE4D | | p- | Aff. | Ctrl. | # | # |
|---|---|---|---|---|---|---|---|---|
| Markers | change | exon | Allele | value | % | % | Aff | Ctrl |
| SNP 250 | Pro > Thr | D1/D2 | A | 0.163 | 2.0 | 1.5 | 604 | 369 |
| SNP 257 | Lys > Thr | 4 | C | 0.381 | 0.2 | 0.0 | 474 | 294 |

PDE4D Isoform Expression

[0220] Failing to find a functional mutation in the known coding exons of PDE4D, we were interested to consider other possible evidence in favor of this gene being a source of the underlying association in this region. We conducted an experiment to study the expression levels of the various isoforms—with any significant differences between patients and controls potentially indicating that regulation of PDE4D is a key element in stroke susceptibility. We used EBV transformed B cell lines from randomly selected patients having ischemic stroke or TIA and from controls. We carried out isoform-specific kinetic RT-PCR analysis to quantify each isoform in 83 stroke patients and 84 controls. The patients were principally ischemic stroke patients, with 32 of them having cardiogenic or carotid stroke. We observed that the total PDE4D message level, as assessed by amplification across exons present in all isoforms (PAN), was significantly lower in patients than in controls (p-value=0.0021). This decrease was due primarily to lower expression of the PDE4D1, PDE4D2 and PDE4D5 isoforms. This significant disregulation of the expression of multiple PDE4D isoforms greatly encouraged us to continue our investigations into the association of the PDE4D gene to stroke.

TABLE 2C
SNP identification, single marker association and LD mapping of the PDE4D region

| SNP | | Public | start in NCBI | end in NCBI | start in | end in |
|---|---|---|---|---|---|---|
| code | marker or exon | name | build 31 | build 33 | SEQ ID NO: 1 | SEQ ID NO: 1 |
| | AC016604 - 3 | | 57547045 | 57547304 | | |
| | AC016604 - 2 | | 57623148 | 57623287 | | |
| | exon 11 | | 58241020 | 58241432 | 1655335 | 1655747 |
| | exon 10 | | 58242009 | 58242191 | 1654576 | 1654758 |
| | exon 9 | | 58242702 | 58242824 | 1653943 | 1654065 |
| | exon 8 | | 58243543 | 58243697 | 1653070 | 1653224 |
| | exon 7 | | 58254845 | 58254944 | 1641818 | 1641917 |
| | exon 6 | | 58256107 | 58256271 | 1640491 | 1640655 |
| | exon 5 | | 58257156 | 58257254 | 1639508 | 1639606 |
| | exon 4 | | 58258185 | 58258356 | 1638406 | 1638578 |
| | exon 3 | | 58259724 | 58259817 | 1636944 | 1637037 |
| | exon D1/D2 | | 58305211 | 58305581 | 1591172 | 1591425 |
| | exon LF4 | | 58446946 | 58446995 | 1449835 | 1449884 |
| | exon LF3 | | 58451540 | 58451613 | 1445217 | 1445290 |
| | exon LF2 | | 58459851 | 58459887 | 1436943 | 1436979 |
| | exon LF1 | | 58482128 | 58482319 | 1414511 | 1414702 |
| | AC022125 - 3 | | 58504109 | 58504274 | 1392556 | 1392721 |
| SNP 204 | SNP5PD890407 | | 58506423 | 58506423 | 1390407 | 1390407 |
| | AC008833 - 6 | | 58507019 | 58507222 | 1389608 | 1389811 |
| | exon D9 | | 58541689 | 58542470 | 1354347 | 1355128 |
| | D5S2000 | | 58585460 | 58585849 | | |
| | D5S2091 | | 58593284 | 58593634 | | |
| | exon D8 | | 58623109 | 58623414 | 1273404 | 1273709 |
| | D17 - C | | 58645088 | 58645386 | 1251432 | 1251730 |
| | AC008804 - 1 | | 58784449 | 58784641 | 1112181 | 1112373 |
| | AC008804 - 2 | | 58817743 | 58817931 | 1078881 | 1079069 |
| | exon D3 | | 58852680 | 58852819 | 1044051 | 1044190 |
| | D17 - H | | 58860588 | 58860725 | 1036142 | 1036279 |
| | D17 - G | | 58942270 | 58942541 | 954298 | 954569 |
| | D5S2080 | | 58998685 | 58999021 | | |
| | exon D5 | | 59034598 | 59035009 | 861791 | 862202 |
| | AC027322 - 5 | | 59159221 | 59159326 | 737420 | 737519 |
| | exon D4 | | 59159520 | 59160492 | 736254 | 737226 |
| SNP 102 | SNP5PD166822 | rs714291 | 59229897 | 59229897 | | |
| | exon D7 - 3 | | 59254840 | 59255069 | 641649 | 641878 |
| SNP 101 | SNP5PD138604 | rs1347401 | 59258113 | 59258113 | 638605 | 638605 |
| SNP 100 | SNP5PD121753 | rs1545070 | 59274962 | 59274962 | | |
| SNP 99 | SNP5PD118378 | rs1533019 | 59278338 | 59278338 | | |
| SNP 98 | SNP5PD117029 | rs952110 | 59279687 | 59279687 | | |
| SNP 97 | SNP5PD104361 | rs1995780 | 59292356 | 59292356 | | |
| SNP 96 | SNP5PD97409 | | 59299308 | 59299308 | | |
| SNP 95 | SNP5PD97281 | rs2016324 | 59299437 | 59299437 | | |
| SNP 94 | SNP5PD75406 | rs1396474 | 59321313 | 59321313 | | |
| SNP 93 | SNP5PD73383 | rs1508864 | 59323336 | 59323336 | | |
| SNP 92 | SNP5PD72097 | rs1508859 | 59324622 | 59324622 | | |
| | DG5S2045 | | 59325313 | 59325563 | 571152 | 571406 |
| | DG5S2039 | | 59332799 | 59333077 | 563636 | 563921 |
| SNP 91 | SNP5PD46864 | rs1508863 | 59349851 | 59349851 | | |
| SNP 90 | SNP5PD43868 | rs2136203 | 59352849 | 59352849 | | |
| SNP 89 | SNP5PD29517 | rs1396476 | 59367167 | 59367167 | | |
| | DG5S2056 | | 59381102 | 59381367 | 515317 | 515582 |
| | DG5S818 | | 59384776 | 59384999 | 511685 | 511908 |
| SNP 88 | SNP5PDM14337 | rs1544788 | 59411021 | 59411021 | | |
| | DG5S397 | | 59438506 | 59438784 | 457900 | 458178 |
| SNP 87 | SNP5PDM43741 | rs2910829 | 59440424 | 59440424 | | |
| | exon D7 - 2 | | 59451909 | 59452039 | 444645 | 444775 |
| SNP 86 | SNP5PDM57997 | rs2962972 | 59454680 | 59454680 | | |
| SNP 85 | SNP5PDM65461 | rs2961897 | 59462144 | 59462144 | | |
| SNP 84 | SNP5PDM67604 | rs719702 | 59464287 | 59464287 | | |
| SNP 83 | SNP5PDM76361 | rs966221 | 59473045 | 59473045 | | |
| SNP 82 | SNP5PDM83539 | rs2961903 | 59480223 | 59480223 | | |
| SNP 81 | SNP5PDM89176 | | 59485859 | 59485859 | 410826 | 410826 |
| SNP 80 | SNP5PDM89683 | rs1862614 | 59486368 | 59486368 | | |
| | DG5S2066 | | 59522085 | 59522346 | 374339 | 374600 |
| SNP 79 | SNP5PDM132154 | | 59528838 | 59528838 | 367847 | 367847 |
| SNP 78 | SNP5PDM153120 | | 59549804 | 59549804 | 346881 | 346881 |
| SNP 77 | SNP5PDM161561 | | 59558245 | 59558245 | 338440 | 338440 |
| SNP 76 | SNP5PDM166786 | | 59563470 | 59563470 | 333215 | 333215 |
| SNP 75 | SNP5PDM181173 | | 59577856 | 59577856 | 318829 | 318829 |
| SNP 74 | SNP5PDM182792 | | 59579475 | 59579475 | 317210 | 317210 |
| SNP 73 | SNP5PDM211974 | | 59608650 | 59608650 | 288027 | 288027 |
| SNP 72 | SNP5PDM217886 | | 59614557 | 59614557 | 282115 | 282115 |
| SNP 71 | SNP5PDM218639 | | 59615310 | 59615310 | 281362 | 281362 |
| SNP 70 | SNP5PDM224528 | | 59621190 | 59621190 | 275473 | 275473 |
| SNP 69 | SNP5PDM236461 | rs1423248 | 59633124 | 59633124 | | |
| SNP 68 | SNP5PDM259844 | | 59656504 | 59656504 | 240157 | 240157 |
| SNP 67 | SNP5PDM261488 | | 59658148 | 59658148 | 238513 | 238513 |
| SNP 66 | SNP5PDM265669 | | 59662328 | 59662328 | 234332 | 234332 |
| SNP 65 | SNP5PDM271674 | rs918590 | 59668333 | 59668333 | | |
| SNP 64 | SNP5PDM275805 | rs1423247 | 59672463 | 59672463 | | |
| SNP 63 | SNP5PDM280894 | rs789389 | 59677551 | 59677551 | | |
| SNP 62 | SNP5PDM285592 | | 59682247 | 59682247 | 214409 | 214409 |
| SNP 61 | SNP5PDM296955 | rs37691 | 59693610 | 59693610 | | |
| SNP 60 | SNP5PDM299842 | | 59696497 | 59696497 | 200159 | 200159 |
| SNP 59 | SNP5PDM307243 | rs37684 | 59703890 | 59703890 | | |
| SNP 58 | SNP5PDM308509 | rs2898278 | 59705155 | 59705155 | | |
| SNP 57 | SNP5PDM310220 | rs401207 | 59706866 | 59706866 | | |
| SNP 56 | SNP5PDM310653 | rs702553 | 59707298 | 59707298 | | |
| SNP 55 | SNP5PDM324741 | rs251726 | 59721387 | 59721387 | | |
| SNP 54 | SNP5PDM326519 | rs27223 | 59723165 | 59723165 | | |
| SNP 53 | SNP5PDM329913 | | 59726556 | 59726556 | 170088 | 170088 |
| SNP 52 | SNP5PDM332989 | | 59729632 | 59729632 | 166900 | 166900 |
| SNP 51 | SNP5PDM338487 | | 59735122 | 59735122 | 161514 | 161514 |
| SNP 50 | SNP5PDM345627 | rs173591 | 59742248 | 59742248 | | |
| SNP 49 | SNP5PDM349039 | rs27220 | 59745661 | 59745661 | | |
| SNP 48 | SNP5PDM351840 | rs37760 | 59748461 | 59748461 | | |
| SNP 47 | SNP5PDM356081 | | 59752701 | 59752701 | 143922 | 143922 |
| SNP 46 | SNP5PDM356447 | | 59753067 | 59753067 | 143555 | 143555 |
| SNP 45 | SNP5PDM357221 | | 59753842 | 59753842 | 142780 | 142780 |
| SNP 44 | SNP5PDM357245 | | 59753865 | 59753865 | 142757 | 142757 |
| SNP 43 | SNP5PDM357445 | | 59754066 | 59754066 | 142556 | 142556 |
| | PART1-exon 1 | | 59754284 | 59754775 | | |
| | exon D7 - 1 | | 59754294 | 59754415 | 142207 | 142328 |
| | PART1-exon 2 | | 59756013 | 59757617 | | |
| SNP 42 | SNP5PDM361194 | rs153031 | 59757816 | 59757816 | | |
| SNP 41 | SNP5PDM361545 | | 59758341 | 59758341 | 138456 | 138456 |
| | AC008818 - 1 | SEQ ID NO: 86 | 59759882 | 59760075 | 136740 | 136547 |
| SNP 40 | SNP5PDM363736 | | 59760357 | 59760357 | 136265 | 136265 |
| SNP 39 | SNP5PDM364360 | rs3887175 | 59760981 | 59760981 | | |
| SNP 38 | SNP5PDM364848 | | 59761469 | 59761469 | 135152 | 135152 |
| SNP 37 | SNP5PDM364888 | rs26956 | 59761510 | 59761510 | 135112 | 135112 |
| SNP 36 | SNP5PDM366629 | | 59763250 | 59763250 | 133371 | 133371 |
| SNP 35 | SNP5PDM367438 | rs26955 | 59764060 | 59764060 | 132562 | 132562 |
| SNP 34 | SNP5PDM368135 | rs27653 | 59764755 | 59764755 | 131865 | 131865 |
| SNP 33 | SNP5PDM369610 | | 59766229 | 59766229 | 130391 | 130391 |
| SNP 32 | SNP5PDM370640 | | 59767259 | 59767259 | 129361 | 129361 |
| SNP 31 | SNP5PDM370641 | rs457053 | 59767260 | 59767261 | 129360 | 129360 |
| SNP 30 | SNP5PDM374696 | rs27221 | 59771316 | 59771316 | 125304 | 125304 |
| SNP 29 | SNP5PDM376181 | rs2963110 | 59772800 | 59772800 | | |
| SNP 28 | SNP5PDM376575 | rs35387 | 59773194 | 59773194 | 123426 | 123426 |
| SNP 27 | SNP5PDM376688 | rs35386 | 59773308 | 59773308 | 123312 | 123312 |
| SNP 26 | SNP5PDM379372 | rs40512 | 59775992 | 59775992 | 120628 | 120628 |
| SNP 25 | SNP5PDM380376 | | 59776995 | 59776995 | | |
| SNP 24 | SNP5PDM381086 | rs35385 | 59777706 | 59777706 | 118914 | 118914 |
| SNP 23 | SNP5PDM388220 | rs26953 | 59784839 | 59784839 | 111781 | 111781 |
| SNP 22 | SNP5PDM388748 | | 59785368 | 59785368 | 111252 | 111252 |
| SNP 21 | SNP5PDM388749 | rs26954 | 59785369 | 59785370 | | |
| SNP 20 | SNP5PDM390700 | | 59787319 | 59787319 | 109301 | 109301 |
| SNP 19 | SNP5PDM392152 | rs4133470 | 59788771 | 59788771 | 107849 | 107849 |
| SNP 18 | SNP5PDM392684 | | 59789302 | 59789302 | 107317 | 107317 |
| SNP 17 | SNP5PDM394085 | | 59790704 | 59790704 | 105792 | 105792 |
| SNP 16 | SNP5PDM394776 | rs35384 | 59791395 | 59791395 | 105225 | 105225 |
| SNP 15 | SNP5PDM395449 | rs35382 | 59792068 | 59792068 | 104552 | 104552 |
| SNP 14 | SNP5PDM397023 | rs26950 | 59793643 | 59793643 | 102977 | 102977 |
| SNP 13 | SNP5PDM399206 | rs26949 | 59795825 | 59795825 | 100795 | 100795 |
| SNP 12 | SNP5PDM400966 | rs153153 | 59797585 | 59797585 | 99035 | 99035 |
| SNP 11 | SNP5PDM402736 | rs152340 | 59799349 | 59799349 | | |
| SNP 10 | SNP5PDM407853 | | 59804468 | 59804468 | 92148 | 92148 |
| SNP 9 | SNP5PDM408531 | | 59805145 | 59805145 | 91470 | 91470 |
| SNP 8 | SNP5PDM408979 | | 59805593 | 59805593 | 91022 | 91022 |
| SNP 7 | SNP5PDM409460 | | 59806074 | 59806074 | 90541 | 90541 |
| SNP 6 | SNP5PDM411387 | | 59808001 | 59808001 | 88614 | 88614 |
| SNP 5 | SNP5PDM411544 | rs27564 | 59808159 | 59808159 | 88456 | 88456 |
| SNP 4 | SNP5PDM416882 | rs153152 | 59813496 | 59813496 | 83119 | 83119 |
| SNP 3 | SNP5PDM417756 | rs187481 | 59814371 | 59814371 | 82244 | 82244 |
| SNP 2 | SNP5PDM419874 | rs152341 | 59816488 | 59816488 | 80127 | 80127 |
| SNP 1 | SNP5PDM421449 | rs248911 | 59818063 | 59818063 | 78552 | 78552 |
| | D5S1990 | | 60945599 | 60945816 | | |
| | D5S1359 | | 63542603 | 63542894 | | |
| | D5S2089 | | 65914315 | 65914496 | | |
| | D5S647 | | 66217674 | 66218065 | | |
| | D5S2121 | | 66584091 | 66584385 | | |

[0221] We next searched for SNPs in the intronic and flanking regions of PDE4D. The SNPs were identified in the public NCBI SNP database or by sequencing selected intronic and flanking regions in the gene in at least 94 patients and 94 controls. We initially identified 637 SNPS. Many of these SNPs were completely correlated so we removed many redundant SNPs from further genotyping. Some SNPs with very low minor allele frequencies were also ignored. This resulted in a set of 260 SNPs that were then genotyped for the entire patient and control cohorts. The preponderance of markers with significant associations was located at the 5′ end of the gene. One SNP (SNP5PDM76361;SNP83) for carotid stroke and five of the SNPs (SNP5PDM357221=SNP45, SNP5PDM361545=SNP41, SNP5PDM43741=SNP87, SNP5PDM29517=SNP89 and SNP5PDMSNP56) for the combined cardiogenic and carotid stroke remained significant even after adjusting for all the SNPs tested (Table 2D). Three of these significant SNPs flank exon D7-1; the other three are in a 100 kb region containing exon D7-2 (for physical positions see Table 2D). The two most significant SNPs, SNP45 and SNP41, are within 6 kb of the microsatellite marker AC008818-1, and the at-risk alleles of all three genetic markers are in strong linkage disequilibrium with D′>0.9 and p-value nearly zero. The square of the correlation (R²) is very high between the two SNPs (˜0.93), but is substantially lower (˜0.08) between each SNP and the at-risk allele of the microsatellite. This is due to the fact that the frequency of the at-risk alleles of the two SNPs are similar, and much more frequent than that for the at-risk allele of the microsatellite. The LD block structure around the 5′ end of PDE4D is displayed in FIG. 13.1. We delineate three blocks Λ, B and C encompassing the first three exons of PDE4D and its immediate downstream region. Exons D7-3 and D7-2 are both in block Λ, while D7-1 (the first exon) is in block B, but close to its border with block C. Given this block structure we were prepared to investigate the haplotype associated susceptibility to stroke in this region. Table 2D. All SNPs that show association with a p-value less than 0.01 for all stroke patients, all patients excluding hemorrhagic stroke and the combined cardiogenic and carotid stroke.

| | | | | | # | Aff. | # | Ctrl. |
|---|---|---|---|---|---|---|---|---|
| Phenotype | Marker | Allele | p-value | RR | Affect | % | Ctrl | % |
| All patients | | | | | | | | |
| | SNP 32 | C | 0.00024 | 1.46 | 400 | 37.9 | 475 | 29.5 |
| | SNP 56 | T | 0.0028 | 1.31 | 550 | 71.4 | 615 | 65.5 |
| | SNP 45 | G | 0.0065 | 1.33 | 723 | 82.4 | 492 | 78.0 |
| | SNP 48 | T | 0.0091 | 1.28 | 547 | 68.3 | 481 | 62.8 |
| All patients | | | | | | | | |
| excl. | | | | | | | | |
| hemorrhagic | | | | | | | | |
| stroke | | | | | | | | |
| | SNP 32 | C | 0.00034 | 1.45 | 377 | 37.8 | 475 | 29.5 |
| | SNP 56 | T | 0.0066 | 1.28 | 518 | 70.9 | 615 | 65.5 |
| | SNP 45 | G | 0.0095 | 1.31 | 679 | 82.3 | 492 | 78.0 |
| Combined | | | | | | | | |
| cardiogenic & | | | | | | | | |
| carotid | | | | | | | | |
| | SNP 45 | G | 0.000034* | 1.77 | 309 | 86.3 | 492 | 78.0 |
| | SNP 41 | A | 0.000078* | 1.86 | 236 | 86.0 | 368 | 76.8 |
| | SNP 87 | T | 0.00019* | 1.49 | 263 | 58.2 | 583 | 48.4 |
| | SNP 89 | A | 0.00025* | 1.84 | 232 | 88.8 | 450 | 81.1 |
| | SNP 56 | T | 0.00027* | 1.56 | 230 | 74.8 | 615 | 65.5 |
| | SNP 39 | T | 0.00032 | 1.58 | 326 | 84.4 | 589 | 77.3 |
| | SNP 91 | G | 0.00047 | 1.80 | 233 | 88.6 | 451 | 81.3 |
| | SNP 32 | C | 0.00069 | 1.61 | 144 | 40.3 | 475 | 29.5 |
| | SNP 62 | A | 0.00089 | 1.73 | 153 | 83.0 | 556 | 73.8 |
| | SNP 48 | T | 0.00080 | 1.51 | 229 | 71.8 | 481 | 62.8 |
| | SNP 42 | A | 0.0018 | 1.49 | 259 | 72.0 | 403 | 63.6 |
| | SNP 184 | G | 0.0025 | 1.68 | 252 | 90.7 | 570 | 85.3 |
| | SNP 58 | T | 0.0042 | 1.54 | 234 | 85.3 | 569 | 79.0 |
| | SNP 53 | C | 0.0041 | 1.58 | 146 | 36.0 | 269 | 26.2 |
| | SNP 97 | G | 0.0046 | 1.40 | 225 | 54.2 | 450 | 45.9 |
| | SNP 204 | A | 0.0049 | 1.32 | 334 | 63.9 | 651 | 57.3 |
| | SNP 8 | A | 0.0054 | 1.59 | 228 | 89.0 | 612 | 83.7 |
| | SNP 83 | C | 0.0074 | 1.39 | 223 | 60.1 | 349 | 52.0 |
| | SNP 43 | T | 0.0093 | 1.48 | 243 | 85.4 | 550 | 79.8 |

*significant after adjusting for multiple testing

Haplotype Analysis

[0222] Our general approach to haplotype analysis involves using likelihood-based inference applied to NEsted MOdels. The method is implemented in our program NEMO, which allows for many polymorphic markers, SNPs and microsatellites. The method and software are specifically designed for case-control studies where the purpose is to identify haplotype groups that confer different risks. It is also a tool for studying LD structures.

[0223] When investigating haplotypes constructed from many markers, apart from looking at each haplotype individually, meaningful summaries often require putting haplotypes into groups. A particular partition of the haplotype space is a model that assumes haplotypes within a group have the same risk, while haplotypes in different groups can have different risks. Two models/partitions are nested when one, the alternative model, is a finer partition compared to the other, the null model, i.e, the alternative model allows some haplotypes assumed to have the same risk in the null model to have different risks. The models are nested in the classical sense that the null model is a special case of the alternative model. Hence traditional generalized likelihood ratio tests can be used to test the null model against the alternative model. Note that, with a multiplicative model, if haplotypes hᵢ and hⱼ are assumed to have the same risk, it corresponds to assuming that fᵢ/pᵢ=f/pⱼ where f and p denote haplotype frequencies in the affected population and the control population respectively.

[0224] One common way to handle uncertainty in phase and missing genotypes is a two-step method of first estimating haplotype counts and then treating the estimated counts as the exact counts, a method that can sometimes be problematic (e.g., see the information measure section below) and may require randomization to properly evaluate statistical significance. In NEMO, maximum likelihood estimates, likelihood ratios and p-values are calculated directly, with the aid of the EM algorithm, for the observed data treating it as a missing-data problem.

[0225] NEMO allows complete flexibility for partitions. For example, the first haplotype problem described in the Methods section on Statistical analysis considers testing whether h₁ has the same risk as the other haplotypes h₂, . . . , hₖ. Here the alternative grouping is [h₁], [h₂, . . . , hₖ] and the null grouping is [h₁, . . . , hₖ]. The second haplotype problem in the same section involves three haplotypes h₁=G0, h₂=GX and h₃=AX, and the focus is on comparing h₁ and h₂. The alternative grouping is [h₁], [h₂], [h₃] and the null grouping is [h₁, h₂], [h₃]. The actual problem we faced in FIG. 11.1 is actually slightly more complicated because allele X is a composite allele that includes five alleles other than allele 0, and hence GX and AX each correspond to five haplotypes. One could have collapsed these alleles into one at the data processing stage, and performed the test as described. This is a perfectly valid approach, and indeed, whether we collapse or not makes no difference if there were no missing information regarding phase. But, with the actual data, each of the 5 alleles making up X correlates differently with the SNP alleles and this provides some partial information on phase. Collapsing at the data processing stage will unnecessarily increase the amount of missing information. What was actually done is natural in the nested-models/partition framework. Let h₂ be split into h₂ₐ, h_{2b}, h₂ₑ, and h₃ be split into h₃ₐ, h_{3b}, . . . , h₃ₑ. Then the alternative grouping is [h₁], [h₂ₐ, h_{2b}, . . . , h₂ₑ], [h₃ₐ, h_{3b}, . . . , h₃ₑ] and the null grouping is [h₁, h₂ₐ, h_{2b}, h₂ₑ], [h₃ₐ, h_{3b}, . . . , h₃ₑ]. The same method is used to handle the composite haplotypes in FIG. 11.2 and 11.3 where collapsing at the data processing stage is not even an option since L_{C} represents multiple haplotypes constructed from 25 SNPs. Here, we also want to mention that, apart from the pair-wise comparisons presented in FIG. 11.1, a 3-way test with the alternative grouping of [h₁], [h₂ₐ, h_{2b}, . . . , h₂ₑ], [h₃ₐ, h_{3b}, . . . , h₃ₑ] versus the null grouping of [h₁, h₂ₐ, h_{2b}, . . . , h₂ₑ, h₃ₐ, h_{3b}, . . . , h₃ₑ] could also be performed. Note that the generalized likelihood ratio test-statistic would have two degrees of freedom instead of one. We actually have performed this test and it gave a p-value of 2.4×10⁻⁷.

Measuring Information

[0226] Even though likelihood ratio tests based on likelihoods computed directly for the observed data, which have captured the information loss due to uncertainty in phase and missing genotypes, can be relied on to give valid p-values, it would still be of interest to know how much information had been lost due to the information being incomplete. Interestingly, one can measure information loss by considering a two-step procedure to evaluating statistical significance that appears natural but happens to be systematically anti-conservative. Suppose we calculate the maximum likelihood estimates for the population haplotype frequencies calculated under the alternative hypothesis that there are differences between the affected population and control population, and use these frequency estimates as estimates of the observed frequencies of haplotype counts in the affected sample and in the control sample. Suppose we then perform a likelihood ratio test treating these estimated haplotype counts as though they are the actual counts. We could also perform a Fisher's exact test, but we would then need to round off these estimated counts since they are in general non-integers. This test will in general be anti-conservative because treating the estimated counts as if they were exact counts ignores the uncertainty with the counts, overestimates the effective sample size and underestimates the sampling variation. It means that the chi-square likelihood-ratio test statistic calculated this way, denoted by Λ*, will in general be bigger than Λ, the likelihood-ratio test-statistic calculated directly from the observed data as described in methods. But Λ* is useful because the ratio Λ/Λ* happens to be a good measure of information, or 1−(Λ/Λ*) is a measure of the fraction of information lost due to missing information. This information measure for haplotype analysis is described in Nicolae and Kong, Technical Report 537, Department of Statistics, University of Statistics, University of Chicago, Revised for Biometrics (2003) as a natural extension of information measures defined for linkage analysis, and is implemented in NEMO.

Haplotype Association

[0227] We first considered haplotypes based on the most significantly associated SNPs and microsatellite, SNP45, SNP41 and AC008818-1, which are all in block B and are separated by only 6 kb. Not surprisingly given the high degree of correlation between SNP45 and SNP41, it was sufficient to consider only the two marker haplotypes consisting of the microsatellite and SNP45—the SNP with the higher genotype yield. The results of this association study for the combination of carotid and cardiogenic stroke are displayed in FIG. 11.1. Note that, for convenience, we have designated by the letter X the joint set of alleles that are not the at-risk allele, 0, of microsatellite AC008818-1. Thus, GX should be understood as the composite of all haplotypes including the G nucleotide of SNP45 except for the G0 haplotype. For our samples, the A0 haplotype does not exist. This suggests that allele 0 originated in a haplotype background with allele G of SNP45, and since then no recombination has occurred between those two markers for chromosomes that carried allele 0. AX, G0 and GX have significantly distinct risks for the combined carotid and cardiogenic stroke phenotype. We refer to GX as the wild type because it is the most common (53.4% in controls) and also because it has the intermediate level risk that is not too different from the population risk. The haplotype G0 has increased risk and AX is protective, with risks of 1.46 and 0.70 relative to the wild type, respectively. The G0 risk is 2.07 times that of the protective haplotype AX. Each of the three pairwise comparisons is highly significant, with p-values ranging from 0.006 to 7.2×10⁻⁸. For example, the p-value of 1×10⁻⁵ or less, 1×10⁻⁶ or less, 1×10⁻⁷ or less or 1×10⁻⁸ or less are possible. It is interesting to observe that even though both AX and GX are composite haplotypes, the AX haplotype can be simply summarized by the allele A of SNP45, since the A0 haplotype does not exist. For a similar reason, the G0 haplotype is completely determined by the 0 allele of AC008818-1. Also displayed in FIG. 11.1 is the information content (Info) of each test. The difference between Info and 1 is a measure of the information that is lost due to the uncertainty with phase and missing genotypes. Note that Info is very close to 1 for each of the three tests in FIG. 11.1. That is a result of SNP45 and AC008818-1 being in very strong LD. Note that tests presented later in FIG. 11.2 and 11.3, involving longer haplotypes have lower information content.

[0228] We next identified and estimated the risks for the common SNP haplotypes within each block. For this portion of the analysis only those SNPs with minor allele frequency greater than 20% were considered. Block A (300 kb) contained 19 such SNPs, block B (200 kb) 22 SNPs, and block C (60 kb) 25 SNPs. All haplotypes within each block with an estimated frequency in the population of 2% or greater have been identified. Within each block there were fewer than ten such haplotypes, and they accounted for approximately 80% of the total haplotype frequency for that block. A brief schematic of the identified haplotypes are displayed in FIG. 13.2 and the risks and frequencies of these haplotypes are available in Table 3. Within block A no common haplotype has greater risk than SNP87 alone. The strongest signals were for haplotypes in block B and C. Each block contained a haplotype significantly associated with the combination of carotid and cardiogenic stroke and having relative risk around 1.5. The common at-risk haplotype in block B is the SNP background of the G0 haplotype previously identified.

[0229] While there were no significant single marker associations in block C, a common haplotype with 15.4% frequency in controls was observed. We designate this haplotype H_{C}. Investigation of the contribution of H_{C} in conjunction with the SNP45 and AC008818-1 haplotypes leads to another interesting observation. For notation, all haplotypes defined by the 25 SNPs in block C that are not H_{C} are jointly denoted by the composite haplotype L_{C}. First, it is noted that AX and H_{C} do not exist together on the same chromosome (see FIG. 11.3), at least in these samples, and thus blocks B and C are far from being independent. As a consequence, the extended composite haplotype AXL_{C} is the same as AX. The haplotype G0 can be split into the two extended haplotypes G0H_{C} and the composite G0L_{C}, which, as indicated in FIG. 11.2, have significantly different risks (p value=0.0067). Moreover, it appears that the elevated risk of G0 is totally accounted for by G0H_{C} as G0L_{C} has risk that is not significantly different from GX=GXH_{C}+GXL_{C} (see FIG. 11.2). This observation allows us to refine the haplotype groupings of FIG. 13.1 into the groupings indicated by FIG. 13.3. The extended at-risk haplotype G0H_{C} (8.8% in controls) and protective composite haplotype AXL_{C} (21.1% in controls), have, respectively, relative risks of 1.98 and 0.68 compared to the wild type (70.1% in controls). Based on these risk estimates, if everybody's risk can be made to correspond to that of a homozygote carrier of the protective variant, the number of cases would be reduced by 55%, which can be interpreted as the population attributed risk of the at-risk haplotype and the wild type combined.

[0230] The at-risk haplotype G0H_{C} spans a region of about 64 kb. While it is possible that the increased risk is due to multiple polymorphisms over that region, the results are also consistent with a relatively recent mutation, as yet to be identified, which occurred in that haplotype background, and since then no recombination has occurred in that extended region for chromosomes carrying the mutation. By contrast, the protective composite haplotype AXL_{C} can be simply represented by allele A of SNP45. Hence, it is possible that allele A of SNP45 is the functional protective variant, although it is possible that the functional variant is simply in strong LD with allele A of SNP45 and has yet to be identified. Indeed, statistically, the effects of SNP45 and SNP41 are indistinguishable from each other.

Statistical Analysis.

[0231] For single marker association to the disease, the Fisher exact test was used to calculate two-sided p-values for each individual allele. All p-values were presented unadjusted for multiple comparisons unless specifically indicated. The presented frequencies (for microsatellites, SNPs and haplotypes) were allelic frequencies as opposed to carrier frequencies. To minimize any bias due the relatedness of the patients who were recruited as families for the linkage analysis, we eliminated first and second-degree relatives from the patient list. Furthermore, we have repeated the test for association correcting for any remaining relatedness among the patients, by extending a variance adjustment procedure described in Risch, N. & Teng, J. (Genome Res., 8: 1278-1288 (1998)). The relative power of family-based and case-control designs for linkage disequilibrium studies of complex human diseases I. DNA pooling. (ibid) for sibships so that it can be applied to general familial relationships, and present both adjusted and unadjusted p-values for comparison. The differences are in general very small as expected. To assess the significance of single-marker association corrected for multiple testing we carried out a randomisation test using the same genotype data. We randomised the cohorts of patients and controls and redid the association analysis. This procedure was repeated up to 500,000 times and the p-value we presented is the fraction of replications that produced a p-value for some marker allele that is lower than or equal to the p-value we observed using the original patient and control cohorts.

[0232] For both single-marker and haplotype analyses, relative risk (RR) and the population attributable risk (PAR) were calculated assuming a multiplicative model (haplotype relative risk model), (Terwilliger, J. D. & Ott, J., Hum Hered, 42, 337-46 (1992) and Falk, C. T. & Rubinstein, P, Ann Hum Genet 51 (Pt 3), 227-33 (1987)), i.e., that the risks of the two alleles/haplotypes a person carries multiply. For example, if RR is the risk of A relative to a, then the risk of a person homozygote AA will be RR times that of a heterozygote Aa and RR² times that of a homozygote aa. The multiplicative model has a nice property that simplifies analysis and computations-haplotypes are independent, i.e., in Hardy-Weinberg equilibrium, within the affected population as well as within the control population. As a consequence, haplotype counts of the affecteds and controls each have multinomial distributions, but with different haplotype frequencies under the alternative hypothesis. Specifically, for two haplotypes hᵢ and hⱼ, risk(hᵢ)/risk(hⱼ)=(fⱼ/pᵢ)/(fⱼ/pⱼ), where f and p denote respectively frequencies in the affected population and in the control population. While there is some power loss if the true model is not multiplicative, the loss tends to be mild except for extreme cases. Most importantly, p-values are always valid since they are computed with respect to null hypothesis.

[0233] In general, haplotype frequencies are estimated by maximum likelihood and tests of differences between cases and controls are performed using a generalized likelihood ratio test (Rice, J. A. Mathematical Statistics and Data Analysis, 602 (International Thomson Publishing, (1995)). deCODE's haplotype analysis program called NEMO, which stands for NEsted MOdels, was used to calculate all the haplotype results presented. To handle uncertainties with phase and missing genotypes, it is emphasized that we do not use a common two-step approach to association tests, where haplotype counts are first estimated, possibly with the use of the EM algorithm, Dempster, (A. P., Laird, N. M. & Rubin, D. B., Journal of the Royal Statistical Society B, 39, 1-38 (1971)) and then tests are performed treating the estimated counts as though they are true counts, a method that can sometimes be problematic and may require randomisation to properly evaluate statistical significance. Instead, with NEMO, maximum likelihood estimates, likelihood ratios and p-values are computed with the aid of the EM-algorithm directly for the observed data, and hence the loss of information due to uncertainty with phase and missing genotypes is automatically captured by the likelihood ratios. Even so, it is of interest to know how much information is retained, or lost, due to incomplete information. Described herein is such a measure that is natural under the likelihood framework. For a fixed set of markers, the simplest tests we performed, with results presented in Table 3, compare one selected haplotype against all the others. Call the selected haplotype h₁ and the others h₂, . . . , hₖ. Let p₁, . . . , pₖ denote the population frequencies of the haplotypes in the controls, and f₁, . . . , fₖ denote the population frequencies of the haplotypes in the affecteds. Under the null hypothesis, fᵢ=pᵢ for all i. The alternative model we use for the test assumes h₂, . . . , hₖ to have the same risk while h₁ is allowed to have a different risk. This implies that while p₁ can be different from fᵢ, fᵢ/(f₂+ . . . +fₖ)=pᵢ/(p₂+ . . . +pₖ)=βᵢ for i=2, . . . , k. Denoting f₁/p₁ by r, and noting that β₂+ . . . +βₖ=1, the test statistic based on generalized likelihood ratios is
Λ=2[l(\hat{r},\hat{p}₁,\hat{β}₂, . . . ,\hat{β}ₖ₋₁)−l(1,\tilde{p}₁,\tilde{β}₂, . . . ,\tilde{β}ₖ₋₁)]
where l denotes logₑlikelihood and ~ and \hat{ } denote maximum likelihood estimates under the null hypothesis and alternative hypothesis respectively. Λ has asymptotically a chi-square distribution with 1-df, under the null hypothesis and it was used to compute p-values presented in Table 3. The tests presented in FIG. 11 have slightly more complicated null and alternative hypotheses. For the results in FIG. 11, let h₁ be G0, h₂ be GX and h₃ be AX. When comparing G0 against GX, i.e., this is the test which gives estimated RR of 1.46 and p-value=0.0002, the null assumes G0 and GX have the same risk but AX is allowed to have a different risk. The alternative hypothesis allows all three haplotype groups to have different risks. This implies that, under the null hypothesis, there is a constraint that f₁/p₁=f₂/p₂, or w=[f₁/p₁]/[f₂/p₂]=1. The test statistic based on generalized likelihood ratios is
Λ=2[l(\hat{p}₁,\hat{f}₁,\hat{p}₂,ŵ)−l(\tilde{p}₁, \tilde{f}₁,\tilde{p}₂,1)]
that again has asymptotically a chi-square distribution with 1-df under the null hypothesis. There is actually an extra complication to the test due to h₂ and h₃ being composite haplotypes. That is handled in a natural manner under the nested models framework. Other tests presented in FIG. 11.2 and 11.3 were similarly performed.

[0234] LD between pairs of SNPs was calculated using the standard definition of D′ and R² (Lewontin, R., Genetics 49, 49-67 (1964) and Hill, W. G. & Robertson, A. Theor. Appl. Genet. 22, 226-231 (1968)). Using NEMO, frequencies of the two marker allele combinations are estimated by maximum likelihood and deviation from linkage equilibrium is evaluated by a likelihood ratio test. The definitions of D′ and R² were extended to include microsatellites by averaging over the values for all possible allele combination of the two markers weighted by the marginal allele probabilities. When plotting all marker combination to elucidate the LD structure in a particular region, we plot D′ in the upper left corner and the p-value in the lower right corner. In the LD plots we present the markers are plotted equidistant rather than according to their physical location.

TABLE 3

Haplotype diversity at the 5′ end of the PDE4D gene.
All haplotypes shown that have >2% population frequency within each of the 3 blocks
of strong LD together with the haplotype association results comparing the combination
of cardiogenic and carotid stroke versus controls.

Block A:

| | | | | | | | | | | | |
|---|---|---|---|---|---|---|---|---|---|---|---|
| SNP 102 | SNP 101 | SNP 100 | SNP 99 | SNP 98 | SNP 97 | SNP 96 | SNP 95 | SNP 93 | SNP 92 | SNP 90 | SNP 88 |

| | | | | | | | | | | | |
|---|---|---|---|---|---|---|---|---|---|---|---|
| T | G | T | A | T | G | A | G | A | G | A | G |
| C | G | C | A | C | C | G | A | G | A | G | A |
| C | G | C | A | C | C | G | A | G | A | G | A |
| C | G | C | A | C | C | G | A | G | A | G | A |
| C | G | C | G | C | G | A | G | A | G | A | G |
| C | A | C | A | C | C | A | G | A | G | A | G |
| C | A | C | A | C | C | A | G | A | G | A | G |
| C | A | C | G | C | G | A | G | A | G | A | G |

| SNP 87 | SNP 86 | SNP 84 | SNP 83 | SNP 82 | SNP 81 | SNP 80 | SNP 79 | p-value | Aff % | Ctrl % | RR |
|---|---|---|---|---|---|---|---|---|---|---|---|
| T | A | G | C | G | G | T | C | 0.0302 | 26.7 | 22.2 | 1.28 |
| C | G | G | C | G | G | T | C | 0.366 | 2.1 | 2.9 | 0.73 |
| C | G | A | T | G | G | A | T | 0.303 | 2.6 | 3.6 | 0.71 |
| C | G | A | T | A | G | A | T | 0.335 | 22.5 | 24.5 | 0.89 |
| T | A | G | C | G | A | A | T | 0.216 | 12.6 | 10.6 | 1.23 |
| T | A | G | C | G | A | A | T | 0.876 | 2.2 | 2.4 | 0.94 |
| C | A | A | T | G | G | T | C | 0.001 | 6.5 | 11.2 | 0.55 |
| T | A | G | C | G | A | A | T | 0.401 | 7.9 | 6.6 | 1.20 |

Block B:

| | | | | | | | | | | | | |
|---|---|---|---|---|---|---|---|---|---|---|---|---|
| SNP-77 | SNP-76 | SNP-73 | SNP-71 | SNP-69 | SNP-67 | SNP-66 | SNP-64 | SNP-63 | SNP-62 | SNP-61 | SNP-59 | SNP-57 |

| | | | | | | | | | | | | |
|---|---|---|---|---|---|---|---|---|---|---|---|---|
| A | A | T | G | T | A | A | G | A | A | C | A | G |
| A | A | T | G | T | A | A | G | A | C | T | A | A |
| G | A | C | A | T | A | A | G | A | A | C | A | G |
| G | A | C | A | T | G | G | A | G | A | T | A | A |
| G | A | C | A | T | G | G | A | G | C | T | A | A |
| G | G | C | A | T | G | A | G | A | A | C | C | G |

| | | | | | | | | | | | | |
|---|---|---|---|---|---|---|---|---|---|---|---|---|
| SNP-56 | SNP-54 | SNP-53 | SNP-49 | SNP-48 | SNP-45 | SNP-42 | SNP-41 | SNP-39 | p-value | Aff % | % | RR |

| | | | | | | | | | | | | |
|---|---|---|---|---|---|---|---|---|---|---|---|---|
| T | A | C | C | T | G | A | A | T | 0.0004 | 29.2 | 21.4 | 1.52 |
| A | A | T | T | C | A | G | G | A | 0.007 | 4.3 | 7.6 | 0.55 |
| T | A | C | C | T | G | A | A | T | 0.958 | 2.0 | 2.1 | 0.98 |
| A | A | T | T | C | G | G | A | T | 0.610 | 6.2 | 5.6 | 1.13 |
| A | A | T | T | C | A | G | G | A | 0.0104 | 3.4 | 6.3 | 0.52 |
| T | G | T | C | T | G | A | A | T | 0.803 | 14.6 | 14.1 | 1.04 |

Block C:

| | | | | | | | | | | | | | |
|---|---|---|---|---|---|---|---|---|---|---|---|---|---|
| SNP 37 | SNP 35 | SNP 34 | SNP 32 | SNP 31 | SNP 30 | SNP 28 | SNP 27 | SNP 26 | SNP 24 | SNP 23 | SNP 22 | SNP 20 | SNP 19 |

| | | | | | | | | | | | | | |
|---|---|---|---|---|---|---|---|---|---|---|---|---|---|
| T | A | A | C | C | A | C | G | A | A | C | T | T | A |
| G | A | A | C | C | A | C | G | A | A | T | C | C | G |
| G | A | A | C | C | A | C | G | A | A | T | C | C | G |
| G | A | A | C | C | A | C | G | A | T | T | C | T | A |
| G | G | C | T | T | C | C | G | A | A | C | T | T | A |
| G | G | C | T | T | C | C | G | A | A | T | C | C | G |
| G | G | C | T | T | C | G | A | G | T | T | C | T | A |

| | | | | | | | | | | | | | | |
|---|---|---|---|---|---|---|---|---|---|---|---|---|---|---|
| SNP 16 | SNP 15 | SNP 14 | SNP 13 | SNP 12 | SNP 6 | SNP 5 | SNP 4 | SNP 3 | SNP 2 | SNP 1 | p-value | Aff % | % | RR |

| | | | | | | | | | | | | | | |
|---|---|---|---|---|---|---|---|---|---|---|---|---|---|---|
| T | T | G | A | A | T | T | T | G | A | A | 0.0006 | 22.2 | 15.4 | 1.58 |
| C | C | G | A | G | C | A | T | C | A | A | 0.533 | 2.2 | 2.8 | 0.78 |
| C | C | G | A | G | T | T | T | G | A | A | 0.24 | 3.0 | 2.0 | 1.52 |
| C | C | A | G | G | C | A | C | C | T | G | 0.302 | 2.6 | 1.8 | 1.46 |
| T | T | G | A | A | T | T | T | G | A | A | 0.258 | 2.0 | 3.0 | 0.68 |
| C | T | G | A | G | C | A | T | C | T | G | 0.0078 | 7.8 | 12.0 | 0.62 |
| C | C | A | G | G | C | A | C | C | T | G | 0.781 | 32.9 | 33.6 | 0.97 |

Allelic definitions and polymorphisms for SNPs in the two most significant haplotypes (in block B and C).

[0235] The analysis presented above represents a conservative analysis of the data since it restricted the analysis to SNPs with minor allelic frequencies of greater than 20%. To further understand the magnitude of the contribution of PDE4D to stroke in this 5 prime region, we repeated the analysis without such restrictions, including all SNPs selected for genotyping. We found a SNP haplotype for the two major subtypes of ischemic stroke, carotid and cardiogenic stroke (Table 3, Block C). This is a 5 SNP haplotype that covers an area of 48 kb and is just upstream of the 5′exon covering the presumed promoter region of isoform PDE4D7. It captures the same information as the 0 allele for marker AC008818-1. However, the SNP haplotype is more specific in the sense that it has a higher relative risk, i.e., 2.3. This haplotype is carried by 47% of the patients and has the same population attributable risk (PAR) of 0.25. The polymorphisms and alleles for the SNPs are presented in Table 4A.

TABLE 4A

| | | | | Allele |
|---|---|---|---|---|
| SNP | Public name | Poly- | | (nucleo- |
| Name | if available | morphism | Position | tide) |
| SNP42 | rs153031 | A/G | 138806 | 0 (A) |
| SNP5PDM361194 | | | | |
| SNP34 | rs27653 | C/A | 131865 | 0 (A) |
| SNP5PDM368135 | | | | |
| SNP32 | rs456009 | C/T | 129361 | 1 (C) |
| SNP5PDM370640 | | | | |
| SNP26 | rs40512 | G/A | 120628 | 0 (A) |
| SNP5PDM379372 | | | | |
| SNP9 | (new) | G/A | 91470 | 0 (A) |
| SNP5PDM408531 | | | | |

[0236] TABLE 4B

| | | | | | | | # | Aff. | # | Ctrl. | | | |
|---|---|---|---|---|---|---|---|---|---|---|---|---|---|
| Phenotype | SNP42 | SNP34 | SNP32 | SNP26 | SNP9 | p-value | Affect | Freq.* | Ctrl | Freq* | R-risk | PAR | info |
| All stroke | A | A | C | A | A | 2.17E−05 | 988 | 0.19 | 652 | 0.12 | 1.8 | 0.16 | 0.604 |
| Cardiogenic/ | A | A | c | A | A | 3.37E−07 | 313 | 0.236 | 652 | 0.119 | 2.3 | 0.25 | 0.616 |
| carotid | | | | | | | | | | | | | |

*allelic frequency

The sequences for the microsatellite markers are as follows:

[0237] AC008879-2 amplimer:

| | |
|---|---|
| ACAAAGAGCACCTTTCCAGTGGACAACTAACTAAAGTGGTGTGATTTTGGT | (SEQ ID NO: 85) |
| ATAAGTTTGTGTGTGTGTGTGTGTGTGTGTTGTGTGTGTGTGTATGTGTATAC | |
| ATTTAGTTTTATTGTAACAAAGCAACTTGTACTTTTCACGTTTAAAA | |

[0238] * AC008879-2, allele 0 is the same allele as the minimum allele observed in CEPH 1347-O₂, family 137, individual O₂.

[0239] In summary, this single SNP haplotype (which is only one haplotype of the several found above but is probably the most tightly associated to stroke) more than doubles an individual's risk for cardiogenic and carotid stroke and accounts for 25% of such strokes in Iceland. The other haplotypes described above provide additional risk for stroke. The magnitude of this risk haplotype is comparable or higher than the well-known clinical risk factors for stroke such as hypertension, diabetes, hyperlipidemia, and smoking.

These SNPs show strong association in patients with cardioembolic and large vessel disease.

[0240] Table 5 and Table 6 show previously known microsatellite markers and novel microsatellites in sequence. Forward and reverse primers are shown.

TABLE 5
Previously Known microsatellite markers in sequence

| | | |
|---|---|---|
| Accession | SEQ ID | SEQ ID |

| | | | | |
|---|---|---|---|---|
| number | Forward primer | NO. | Reverse primer | NO. |

| | | | | | |
|---|---|---|---|---|---|
| D5S2107 | GDB: 614475 | AGCCTTTGGGCCAACA | 15 | CAAACCAACAGGAGTAT | 16 |
| | | | | GTACTTTT | |
| D5S468 | GDB: 593646 | AAATGAATGGTAGATTT | 17 | TGGGAAAATAAATACAT | 18 |
| | | AACCTGAG | | GCG | |
| D5S2000 | GDB: 608769 | TTATACCAGGAGAGTAGA | 19 | CATGCTAATTTCAAATAT | 20 |
| | | CTTTTTT | | GAGAG | |
| D5S2091 | GDB: 613806 | GCATTTGTCATGTGCCA | 21 | GGTATTTCATTCACAGCCA | 22 |
| | | | | GTC | |
| D5S2500 | GDB: 683034 | TTAAAGGAGTGATCTCCC | 23 | GTTACAGTACCTATGGTCA | 24 |
| | | CC | | TGCC | |
| D5S2080 | GDB: 613188 | GCACTGTGAATTTCAAAT | 25 | GTCAGGGGACTGGGAT | 26 |
| | | G | | | |
| D5S2018 | GDB: 609957 | CCTGTAAACAATGAAAAC | 27 | AGACTATGCTGTGTGTGT | 28 |
| | | CCACTGA | | GCCTG | |
| D5S2071 | GDB: 612756 | TCTGGGTTTACAACCTTCA | 29 | TAACTGGCTTGGCCCG | 30 |
| | | AA | | | |

[0241] TABLE 6
Novel microsatellites in sequence:

| | |
|---|---|
| SEQ ID | SEQ ID |

| | | | |
|---|---|---|---|
| Forward primer | NO. | Reverse primer | NO. |

| | | | | |
|---|---|---|---|---|
| DG5S382 | CAGTAAATAGTTTGCTTCAGGCATT | 31 | CTCATACTCTGCGTGGCTTG | 32 |
| AC008829-5 | AGGGCTAAGTGGATCACAGC | 33 | AGAGGGTCTTGCCACTGTGT | 34 |
| AC008833-2 | TCTGCAAGACTCTCGGTGCT | 35 | TGCAGATCTCATATTTCCATGTTT | 36 |
| AC008833-3 | TCTGCCCTTTGTTCCTCATC | 37 | GTCAAGGGAGTGATGGCAGT | 38 |
| AC022125-3 | AAAATGACTGCCTCCCACAA | 39 | GGGAAATCATACTGCCCTCA | 40 |
| AC008833-6 | AAACATAGCCACCCTGTTGC | 41 | TCCAAAGCCCTTAGCTTAATCA | 42 |
| D17-C | GCTCCCTGGACTGTGGTAAA | 43 | GCCACATTGCTGTCACATTT | 44 |
| D17-B | TTTTTCAGGGCTGGGTAGAA | 45 | TCCAAAGGAAGTGAAATCAGTG | 46 |
| D17-D | CTAACCCATCCTCACCCAAT | 47 | TGTGGCATACAGGGAAGTGA | 48 |
| AC008804-1 | GTGCTGGAATTTGGCTCCTA | 49 | CAAACATCATTTTGCCTTGC | 50 |
| AC008804-2 | TCCCAAACGATAGCTGTTGC | 51 | GAATTAGGACGGTGGCTCAA | 52 |
| AC008804-3 | TTTGCATTCATCACTCATTCG | 53 | CCCGTAGCATCTGATCCAGT | 54 |
| D17-H | AGAAAGCTTCCCCTCCACTG | 55 | CATTCCAGCCTGAGCTACAA | 56 |
| D17-G | TGGGCTCCAATTATCCTTCC | 57 | TGCAGTTTGCACTCTCCTTG | 58 |
| AC027322-12 | TTATCTGTTCCCCATGCTTTT | 59 | TGTTACATCTTGATCTATGACGTTT | 60 |
| AC027322-10 | TGTATCCTGCATCCCTTGTT | 61 | GGAATAACCCAAAAGTAATTGTAGTGA | 62 |
| AC027322-9 | TCGTGCCAAGATGAAAATGA | 63 | AAACCTCCCTGATCATCTGAA | 64 |
| AC027322-8 | ACAGAGGAGCAAAGGAATCA | 65 | TTGGCACGAATCACTCTCTG | 66 |
| AC027322-3 | CCCCATTTGGATGATGGTAA | 67 | TGAGAACATCTAACGTCTTTTTCAA | 68 |
| AC027322-5 | GGCACAGATAACTGGGAAGC | 69 | CCCCCAAAAGTACTGCATAAA | 70 |
| DG5S397 | ATGTTGGCATTTGGTGAGGT | 71 | CACCTGTCCCTTTGGAGGTA | 72 |
| AC008879-2 | TTTTAAACGTGAAAAGTACAAGTTGC | 73 | ACAAAGAGCACCTTTCCAGTG | 74 |
| *AC008818-1 | TGCTTGGTGAAGGAATAGCC | 75 | GAGCCTGGGTTCTCAGGAAT | 76 |
| **AC008879-3 | GGCAAGAACAGTTTGGAGGA | 77 | GACTGCTGTTTGCTGGTTGA | 78 |
| AC020733-1 | AAATGGCTATAAAGTGCTTTGAAC | 79 | CGGTGTCAACAACCAGAACA | 80 |
| AC016591-2 | CAGAAACACACAGAAGTCATTCAA | 81 | CAGACCCAATTAATGGCAAAA | 82 |
| DG5S405 | TCTGTCTTCTTTGACCCATGAAT | 83 | CAACACAGCGAGACCTCATC | 84 |

*Product Size 194, tetranucleotide repeat
**Product Size 150; dinucleotide repeat

[0242] TABLE 7
Correlation between at-risk alleles for markers AC008818-1,
SNP45 and SNP41. Estimates of LD (correlation) between
the at-risk alleles, allele 0 for marker AC008818-1, allele
G for SNP45 and allele A for SNP41, the three most significant
disease associated genetic markers.

| | R² | | |
|---|---|---|---|
| Frequency | AC008818-1 | SNP 45 | SNP 41 |

A. Combined cardiogenic and carotid patients

| | | | | | |
|---|---|---|---|---|---|
| D′ | AC008818-1 | 0.355 | | 0.090 | 0.076 |
| | SNP 45 | 0.863 | 1 | | 0.943 |
| | SNP 41 | 0.860 | 0.906 | 0.981 | |

B. Controls

| | | | | | |
|---|---|---|---|---|---|
| D′ | AC008818-1 | 0.255 | | 0.091 | 0.078 |
| | SNP 45 | 0.780 | 1 | | 0.920 |
| | SNP 41 | 0.768 | 0.924 | 0.968 | |

[0243] TABLE 8
Association of risk factors.
Association of microsatellite AC008818-1 at-risk allele 0, SNP45 allele A and haplotype G0H_{C} respectively with various risk factors.
Cases are stroke patients with risk factors and controls are stroke patients without the risk factors. P-values are two-sided.

| | | | | | | | | | | | Haplotype G0H_{C} | | | | |
|---|---|---|---|---|---|---|---|---|---|---|---|---|---|---|---|
| | AC008818-1: Allele 0 | | | | | SNP45: Allele A | | | | | | | Cases without | | |
| | Cases with | | Cases without | | | Cases with | | Cases without | | | Cases with | | risk factor | | |
| | risk factor | | risk factor | | P- | risk factor | | risk factor | | P- | risk factor | | | | P- |
| | N | Frq. | N | Frq. | value | N | Frq. | N | Frq. | value | N | Frq. | N | Frq. | value |
| Hypertension | 477 | 0.303 | 203 | 0.303 | 1.000 | 416 | 0.172 | 181 | 0.188 | 0.510 | 503 | 0.134 | 216 | 0.123 | 0.634 |
| Hyper- | 274 | 0.336 | 312 | 0.271 | 0.025 | 242 | 0.216 | 277 | 0.186 | 0.516 | 287 | 0.153 | 329 | 0.104 | 0.026 |
| cholesterolemi | | | | | | | | | | | | | | | |
| Diabetes | 93 | 0.274 | 424 | 0.310 | 0.379 | 79 | 0.196 | 398 | 0.176 | 0.422 | 100 | 0.127 | 455 | 0.133 | 0.857 |
| Peripheral | 133 | 0.297 | 357 | 0.305 | 0.815 | 116 | 0.181 | 340 | 0.176 | 0.921 | 138 | 0.121 | 388 | 0.132 | 0.697 |
| artery occlusive | | | | | | | | | | | | | | | |
| Coronary | 179 | 0.302 | 429 | 0.318 | 0.588 | 153 | 0.170 | 406 | 0.182 | 0.662 | 181 | 0.122 | 467 | 0.141 | 0.444 |
| artery disease | | | | | | | | | | | | | | | |
| Early onset (<68) | 349 | 0.294 | 462 | 0.304 | 0.137 | 314 | 0.186 | 430 | 0.173 | 0.538 | 380 | 0.128 | 506 | 0.125 | 0.876 |
| Males vs females | 457 | 0.291 | 358 | 0.310 | 0.414 | 420 | 0.181 | 303 | 0.168 | 0.575 | 489 | 0.122 | 370 | 0.141 | 0.315 |

Discussion of Stroke Gene Identification

[0244] Genealogy, a comprehensive population-based list of broadly defined stroke patients and non-parametric allele sharing methods have been combined to successfully map a major gene to chromosome 5 for one of the most complex diseases known. We then used a large case-control association study that showed that PDE4D is the gene in this location that is the gene conferring substantial risk for stroke. This is the first gene ever mapped and isolated for the common forms of stroke. There was no correlation between the contribution of the families to this gene location and hypertension, diabetes or hyperlipidemias and this gene does not match any known gene contributing to these risk factors. The types of stroke studied in this work do not reflect a rare or Icelandic-specific form of stroke; rather, the diversity of the stroke phenotypes in Icelanders as well as risk factors are similar to those of most other Caucasian populations (Agnarsson, U., et al., Ann. Intern. Med., 130: 987 (1999); Eliasson, J. H., et al., Læknablai, 85: 517-25 (1999); Sveinbjörnsdottir, S., et al., Systematic registration of patients with Stroke and TIA admitted to The National University Hospital, Reykjavik, Iceland, in 1997, XIII. Meeting of the Icelandic Association in Internal Medicine, Akureyri, Iceland (Valdimarsson, E. M., et al., Læknabladid 84: 921 (1998)).

[0245] The magnitude of the risk and the frequency of the disease haplotypes in the general population confirm that we have mapped a gene for the common forms of stroke and not some rare form of stroke. This gene almost doubles one's risk for stroke in general, and more than doubles one's risk for the two most common subtypes of stroke, carotid and cardiogenic stroke. In addition, the most common disease haplotype has a population attributed risk of 25% (which means it accounts for 25% of the patients) and there are other haplotypes that we describe herein that are less common that accounts for other patients. Thus PDE4D is a major cause of stroke and its relative risk rivals those of hypertension, smoking, diabetes, and hyperlipidemia. PDE4D shows tighter correlation to the forms of stroke dependent on atherosclerosis (carotid and cardiogenic stroke) and it is expressed in cell types known to be important for atherosclerosis such as vascular smooth muscle cells, macrophages, and endothelial cells. This suggests that the strong effect that PDE4D variation has on stroke risk is through its role in the vascular biology of atherosclerosis (see discussion at the end of the examples). Example 2 details our sequencing of the entire PDE4D gene and the definition of its exon-intron structure based on new and old cDNAs, and Example 3 shows that the expression pattern of PDE4D isoforms correlates with a stroke associated haplotype.

### Example 2

### Sequencing and Characterization of the Human Gene and its RNA/Protein Isoforms

Sequence of the Stroke Gene Region

[0246] At the start of our work, there was little genomic sequence available in the public domain covering the stroke gene region. Therefore, we sequenced approximately 3 Mb of the area defined by one drop in lod. The locus on 5q12 indicated in the genome wide scan was physically mapped using bacterial artificial chromosomes (BACs). A set of overlapping clones for a 20 cM region was assembled through a combination of hybridization and BAC-fingerprint walking. Eighteen BACs (bacterial artificial clones) (RP11-164A5, RP11-188115, RP11-313P15, RP11-631M6, RP1′-103A15, RP11-489L13, RP11-621C19, RP11-113C1, RP 11-567M18, RP11-412M9, RP11-151G2, RP11-151F7, RP1′-281M3, RP11-421L6, RP1-1A7, RP11-68E 13, RP11-379P8, and RP 11-422K3) covering the minimum tiling path of the one LOD interval were analysed using shotgun cloning and sequencing. Dye terminator (ABI PRISM BigDye) chemistry was used for fluorescent automated DNA sequencing. ABI prism 377 sequences were used to collect data and the Phred/Phrap/Consed software package in combination with the Polyphred software were used to assemble sequences (See Table 9A and 9B) Publicly available sequences (AC008836, AC073546, AC021603, AC008498, AC016435, AC021601, AC016591, AC008818, AC008879, AC008934, AC011929, AC027322, AC008111, AC020924, AC026693, AC012315, AC08804, AC008791, AC020975, AC008833, AC008829, AC022125, AC008790, AC026095, AC066693, AC008852, AC016642, AC034250, AC025179, AC08814, AC008926, AC010391, AC016635 and AC016604) from this region were assembled with the obtained sequence and a 3.7 Mb sequence (with 22 gaps) was generated. Comparison of the current public human assembly (NCBI BUILD 33) to our sequence of the STRK1 locus only showed a minor discrepance.

[0247] The BAC clones we sequenced are from the RCPI-11 Human BAC library (Pieter dejong, Roswell Park). The vector used was pBACe3.6. The clones were picked into a 94 well microtiter plate containing LB/chloramphenicol (25 μg/ml)/glycerol (7.5%) and stored at −80° C. after a single colony has been positively identified through sequencing. The clones can then be streaked out on a LB agar plate with the appropriate antibiotic, chloramphenicol (25 μg/ml)/sucrose (5%).

TABLE 9A

| Sequenced at Decode | | |
|---|---|---|
| (BAC name) | Comment | Accession number |
| RP11-621C19 | 1 | AC020733 |
| RP11-113C1 | 2 | |
| RP11-412M9 | 2 | |
| RP11-151G2 | 2 | |
| RP11-151F7 | 2 | |
| RP11-281M3 | 2 | |
| RP11-421L6 | 2 | |
| RP11-68E13 | 2 | |
| RP11-379P8 | 2 | |
| RP11-1A7 | 1 | AC008111 |
| RP11-422K3 | 2 | |

Key to “Comment” column:
1 = This BAC has a publicly available sequence, it was sequenced at Decode to make sure the sequence was correct
2 = Only BAC end-sequence available for this BAC publicly.

[0248] TABLE 9B

| Sequences available from | | |
|---|---|---|
| GenBank (BAC name) | Accession number | Status of sequence |
| RP11-621C19 | AC020733 | 17 unordered pieces |
| CTD-2003D5 | AC016591 | complete sequence |
| CTD-2210C1 | AC008879 | 7 unordered pieces |
| CTD-2124H11 | AC008818 | complete sequence |
| CTD-2301A11 | AC008934 | complete sequence |
| RP11-16B11 | AC011929 | 7 unordered pieces |
| CTC-261E10 | AC026693 | complete sequence |
| CTD-2027G10 | AC027322 | complete sequence |
| RP11-1A7 | AC008111 | 8 unordered pieces |
| CTD-2122K7 | AC012315 | complete sequence |
| CTD-2085F10 | AC008804 | complete sequence |
| CTD-2040J22 | AC008791 | complete sequence |
| RP11-235N16 | AC020975 | 16 ordered pieces |
| CTD-2146O16 | AC008833 | complete sequence |
| CTD-2084I4 | AC022125 | 17 ordered pieces |
| CTD-2140K22 | AC008829 | 26 ordered pieces |
| CTD-2124D11 | AC020924 | 7 ordered pieces |
| RP11-731H6 | AC026095 | 21 unordered pieces |

PDE4D Gene; Identification of New Exons and Splice Variants

[0249] The gene, human cAMP specific phosphodiesterase 4D (HPDE4D) was identified in the sequenced region by BLAST of our novel genomic sequence with the cDNAs/EST databases from GenBank. In addition, we ran RT-PCR reactions and 5 prime and 3 prime RACE reactions using cDNA libraries generated from a variety of tissues including human aorta. The primer sites used corresponded to known or exons predicted from our genomic sequence using Genscan, and Fgene. We found several novel cDNAs and matched them to the 3 Mb sequence in and around PDE4D. The genomic sequence covering all known and novel exons in PDE4D so far is approximately 1,550,000 bases in length.

[0250] We defined new alternative transcripts which together with previously known transcripts showed that the PDE4D gene contains 22 exons over at least 1.5 Mb and overlaps with the PART1 gene whose transcript is on the other strand at the 5′ end. The PDE4D gene has at least 7 promoters and encodes 8 protein isoforms. All isoforms have an identical C-terminal catalytic domain but differ at the N-terminal regulatory domain. Six of the 8 forms are so called long isoforms. Each of them have unique N-terminal regulatory domains but they are all characterized by two highly conserved regions found in all PDE4 subfamilies, i.e. upstream conserved regions 1 and 2 (UCR 1 and 2). The six long forms differ from each other by unique alternative 5 prime exons which predicts six alternative promoters that are each upstream of the corresponding 5 prime exon. The remaining two are the so-called short forms, variants that lack the UCR 1 (Houslay, M. D. & Adams, D. R., Biochem J, 370, 1-18 (2003)). The five previously known isoforms are encoded by 17 exons distributed over a segment of 0.9 Mb.

[0251] The three new exons D7A-1, D7A-2 and D7A-3 are spliced to one another and together splice onto exon LF1 forming the splice variant we named PDE4D7 (FIG. 3). Exon D7-1 is non-coding. Exons D8 and D9 are spliced by themselves onto exon LF1 forming two splice variants we named PDE4D8 and PDE4D9, respectively (FIG. 3).

[0252] In terms of genomic structure, the D7A exon extends the 5′ end of PDE4D by 590,000 bp, and the D8 and D9 exons lie between exons D3 and LF1 (physical position of exons presented in Table 2C). The new PDE4D7 isoform has an open reading frame extending into LF1, resulting in additional 91 amino acids at the N-terminus of the predicted protein. The D8 and D9 5′ exons contain a long 5′ UTR, followed by an ATG near the end of the exons that extends an ORF into LF1 resulting in a novel N-terminal segments of 22 and 30 amino acids in the PDE4D8 and PDE4D9 predicted proteins, respectively. The new splice variants were verified by RT-PCR on different cDNA tissue panels and subsequent cloning and sequencing of the products.

[0253] The PDE4D gene encodes at least eight different isoforms. Six of the eight forms are the so-called long isoforms. Each of them has an unique N-terminal regulatory domain but they are all characterized by two highly conserved regions found in all PDE4 subfamilies, i.e., upstream conserved regions 1 and 2 (UCR 1 and 2). The remaining two isoforms are the short forms, variants which lack the UCR 1.

[0254] Three PDE4D isoforms have been submitted to GenBank by Memory Pharmaceuticals on Sep. 16, 2002 and Dec. 17, 2002, under accession numbers AF536975 (isoform named PDE4D6), AF536976 (named PDE4D7) and AF536977 (named PDE4D8). See also PCT WO 01/00851, published Jan. 4, 2001. The sequence AF536977 corresponds to our earlier reported PDE4D6 isoform and AF536976 corresponds partly to our earlier reported PDE4D7 isoform, however the first untranslated exon we named D7-1 is missing from this sequence. The sequence AF536975 is a new short PDE4D isoform. We have therefore changed the isoform names accordingly herein as follows: PDE4D6 is now called PDE4D8, PDE4D7 is now called PDE4D7 and PDE4D8 is now called PDE4D9. We have submitted the new PDE4D splice variants, PDE4D7 and PDE4D9 to GenBank (Accession numbers AY245866 and AY245867, respectively).

[0255] We have in addition identified 17 putative exons upstream of LF1, based on ESTs, mouse homologies and GeneMiner exon predictions. Primers designed from these exons were used in conjunction with primers from LF1 and exon3 for RT PCR in the hope of identifying novel exons. Novel exons were in turn used to design primers for various RT-PCR reactions. We also used 5′RACE primers, designed from the known exons upstream of LF1. We have to date identified 14 new exons, including exons belonging to UniGene Cluster Hs. 343602 that have now been connected to LF1.

[0256] For the 5′ RACE reactions we used cDNA made from heart, SkNAS (neuroblastoma cell line) and HVAEnd 5050 (endothelial cell line). For RT-PCR reactions a number of cDNAs made of total RNA were used (see below).

[0257] Novel exons in Table 10A are in italics; previously know PDE4D exons in white. Exon 3 of EST AW272330 is included on the table as a representative of the 3′ of ESTs from UniGene cluster Hs 343602. The positions given are from SEQ ID NO: 1. Note the different splicing of 4D9-3.2, 4D9-3.1, and AW272330exon3. Total RNA was isolated from HeLa, SkNAs and Jurkat 77 cell cultures according to manual, using the TRIZOL® reagent provided by GibcoBRL. We used the GeneRacer™, ThermoZyme™ and TOPO TA cloning® (containing pCR®2.1-TOPO®) kits from Invitrogen following the manufacturer's protocol.

TABLE 10A

| | | | | supported by |
|---|---|---|---|---|
| exon # | EXON | SEQ ID 1 | SEQ ID 1 | EST(s) |
| 1 | 4D7-A | 108127 | 108217 | Yes |
| 2 | PDE4D7-1 | 142207 | 142328 | PDE4D |
| 3 | 4D7-4 | 257650 | 257705 | Yes |
| 4 | 4D7-8 | 288224 | 288393 | No |
| 5 | 4D7-B | 295203 | 295251 | No |
| 6 | 4D7-5 | 352169 | 352317 | No |
| 7 | 4D7-6 | 441914 | 442036 | No |
| 8 | PDE4D7-2 | 444645 | 444775 | PDE4D |
| 9 | 4D7-C | 482438 | 482719 | No |
| 10 | 4D7-7 | 597399 | 597534 | Yes |
| 11 | 4D7-9 | 626020 | 626092 | No |
| 12 | PDE4D7-3 | 641649 | 641878 | PDE4D |
| 13 | PDE4D4 | 736254 | 737226 | PDE4D |
| 14 | PDE4D5 | 861791 | 862202 | PDE4D |
| 15 | PDE4D3 | 1044051 | 1044190 | PDE4D |
| 16 | 4D9-1 | 1069544 | 1069629 | Yes |
| 17 | 4D9-2 | 1069936 | 1069993 | No |
| 18 | 4D9-3.2 | 1071661 | 1071795 | Yes |
| | 4D9-3.1 | 1071668 | 1071795 | |
| | AW272330exon3 | 1071668 | 1071901 | |
| 19 | 4D9-4 | 1121821 | 1121892 | No |
| 20 | 4D9-5 | 1247621 | 1247696 | No |
| 21 | PDE4D8 | 1273404 | 1273709 | PDE4D |
| 22 | PDE4D9 | 1354347 | 1355128 | PDE4D |
| | LF1exon | 1414511 | 1414702 | PDE4D |

[0258] Sequence of New Exons:

| | |
|---|---|
| >4D7-A | |
| GGCCTCGAGCAGAACTTCCCATTTGAGTGGGACCAAGAAGAGCATACAAAG | (SEQ ID NO: 88) |
| CTGAAATGTTCTCCAGAAGTTGATTTCCAATGGGGATAAA | |
| >4D7-4_From Forward Primer | |
| TGATTACAGGTTTTAGAGAAGAGGAACAATGCTTCCTCTGAGCCTGAAGAA | (SEQ ID NO: 89) |
| AAGAA | |
| >4D7-8 | |
| AGTTCTGACCATGTCCTGTGTCACTCTCAAGCAGAGATTGAAAATGACATTC | (SEQ ID NO: 90) |
| GTCCTTTACTTGTTCCAAGGAAGCAAACATTTTATAGTTTGAAACTGTTTCTC | |
| TTGCATTTGCTTTGCAAGAGGTTTGCAGAAGTTAAGCCTCATGGAGTCTTCT | |
| CTCCTTAACTTAA | |
| >4D7-B | |
| TGTGAAGAATTTGGAAATTGCAAGGAGCATGGGAAGGAGATGATTTGGG | (SEQ ID NO: 91) |
| >4D7-5 | |
| GAATGAAGAGGAAATCAAGACATACTTAGATAAAAACAGATTATCACCAG | (SEQ ID NO: 92) |
| GAGATCTGCTGTAAAAGAATGGCTAAAGGAAGTTAGCTAAGCAGAAAGGA | |
| AGTAACATAAAAAGGAACCTTGGAACATCAGGGAGGACAAAAGAACATG | |
| >4D7-C | |
| TTTCTCTTTCTCCAATCACTCACTCTGGAGGCAGCTAGCTGTCAACTCACAA | (SEQ ID NO: 93) |
| AGACACTCAAGCAGCCTATGGAAGAAGGCCACATGGTAAAATATGGAGGC | |
| CTCCAGCCAACAGTCAGCAAGGAACTGAGACAAGTCAACAACCATGTGAGT | |
| GACTCGAGAAGTGCTTCTCTAGCTCCAGTTGAGACTTGCAGTAGCAGCAGC | |
| CTCAGCTGGCGGCTTGACTGCAATCTCTTGAGAGACCCTAAGCTCTCCTGAA | |
| TTCTTGATCCTTAGAAACTGTGTGAG | |
| >4D7-6 | |
| GGTCTAGCTGTGTCCCAGAGAGCAACTTCCCTTTTCAAQGCAGCCCACTCTG | (SEQ ID NO: 94) |
| TGTGATGCTTTTTCCTAGGTATGGGCAACCCATCCCTCCTAGGGTGAAAACT | |
| TCGCTGTTGCTAGTTCCAG | |
| >4D7-7 | |
| AATGATGCCGTATTATTCTCCTGACCTAACTTCAAAGAAATAAAGAGTTTGC | (SEQ ID NO: 95) |
| AAGAAGAACTGCAGTTCTTCAAAGTACGCAATATGGATTTCCAAGATGAAT | |
| GTAGTTTCTCTCTCTGAGGAATTCTGAACAGTG | |
| >4D7-9 | |
| GACTTGAGCATCTGAAGATTTTGGTTTCTGCAGAGGGTGGGAAAGGTTGAA | (SEQ ID NO: 96) |
| CCAATCCCCCATGGATACCAAG | |
| >4D9-1 | |
| GGCTTTCCAGATCCCTGAAGATAAAATACAAACTCTCCAACAAGACCTTT | (SEQ ID NO: 97) |
| TGGCCATCAGGAACGCAGCACCTGGCTCTCTCACTA | |
| >4D9-2 | |
| AAAGTCGCAGAGATAGCCGAGAACAAGAACCAGATCTCACAGTCATGGTG | (SEQ ID NO: 98) |
| CCAAAAGA | |
| >4D9-3.1 | |
| CTGTTACCCTAGCATGACTGCTTCAGCGAAGAGATAAGAGCTTCTTTGACTT | (SEQ ID NO: 99) |
| TTTCCACTGGAATTTTTCATGCCAGAAGAAATTGAACATGTGAGCCTGGTGT | |
| CTGGAAGAGTAGCCTGGATTTATG | |
| >4D9-3.2 | |
| AATTCAGCTGTTACCCTAGCATGACTGCTTCAGCGAAGAGATAAGAGCTTCT | (SEQ ID NO: 100) |
| TTGACTTTTTCCACTGGAATTTTTCATGCCAGAAGAAATTGAACATGTGAGC | |
| CTGGTGTCTGGAAGAGTAGCCTGGATTTATG | |
| >4D9-4 | |
| TTCCTTGATAGTTCCAATATCTGTAATCTTGTTGGTCTACCTGTGCAGTTTAT | (SEQ ID NO: 101) |
| TCCACTGATTGTCTCTCAG | |
| >4D9-5 | |
| GCGAAAATACTGAGGCTCAACAGACATAAAATGGCTTGAGTTACCAGGCTA | (SEQ ID NO: 102) |
| CAGTAGAACTAGGATTTCAGTCCAG | |

Splicing of the Exons as identified by RT-PCR/RACE
New exons are in italics.
[0259] RT4D7: 4D7-1+4D7-2+4D7-3+LF1
[0260] RT1: 4D7-1+4D7-8+4D7-2+4D7-3+LF1
[0261] RT2: 4D7-4+4D7-2+4D7-9+4D7-3+LF1
[0262] RT3: 4D7-2+4D7-3+LF1
[0263] RT4: 4D7-1+4D7-2+4D7-7+4D7-3+4D9-1+4D9-3.1
[0264] RT5: 4D7-1+4D7-2+4D7-3+4D9-2+4D9-3.1
[0265] Race6: 4D7-A+4D7-B+4D7-2+4D7-C+4D7-3
[0266] RT7: 4D7-1+4D7-4
[0267] RT8: 4D7-1+4D7-5+4D7-2
[0268] RT9: 4D7-1+4D7-6+4D7-2
[0269] RT10: 4D9-1+4D9-3.1+LF1
[0270] RT11: 4D9-2+4D9-3.2+LF1
[0271] RT12: 4D9-3+4D9-4+LF1
[0272] RT13: 4D9-3+4D9-4+4D9-5+LF1
[0273] RT14: 4D9-3+LF1

[0274] Detection of variants in cDNA from various tissues:

TABLE 10B

| | RT4D7 | RT1 | RT2 | RT3 | RT4 | RT5 | RT6 | RT7 | RT8 | RT9 | RT10 | RT11 | RT12 | RT13 | RT14 |
|---|---|---|---|---|---|---|---|---|---|---|---|---|---|---|---|
| Bone Marrow | − | − | − | * | − | − | n | n | n | n | n | − | − | − | − |
| Brain | + | − | − | * | − | − | n | n | n | n | n | n | − | + | − |
| fetal Brain | + | − | − | * | − | − | n | n | n | n | n | n | − | − | − |
| colon | + | + | − | * | − | − | n | n | n | n | n | n | − | − | − |
| Heart | − | − | − | − | − | − | − | − | − | − | − | − | − | − | + |
| HVAEend 5050 | − | − | n | n | n | n | + | − | − | − | + | + | n | n | + |
| Kidney | + | − | + | + | − | − | n | n | n | n | n | n | − | − | − |
| Liver | − | − | − | * | − | − | n | n | n | n | n | − | − | − | − |
| Placenta | − | − | − | * | − | − | n | n | n | n | n | − | − | − | − |
| Prostate | + | − | − | * | + | − | n | n | n | n | n | n | − | − | * |
| Salivary gland | + | − | − | * | − | − | n | n | n | n | n | n | − | − | − |
| Skeletal Muscle | − | − | − | − | − | − | n | n | n | n | n | n | + | − | + |
| SkNAS cell line | + | − | n | * | n | n | − | + | + | + | − | − | n | n | − |
| Spinal Cord | − | − | − | − | − | − | n | n | n | n | n | n | − | − | * |
| Spleen | − | − | − | * | − | − | n | n | n | n | n | n | − | − | + |
| Testis | − | − | − | − | − | − | n | n | n | n | n | n | − | − | * |
| Thymus | + | − | − | * | − | − | n | n | n | n | n | n | − | − | − |
| Thyroid | + | − | − | * | − | + | n | n | n | n | n | n | − | − | + |
| Trachea | + | − | − | * | − | − | n | n | n | n | n | n | − | − | − |
| Uterus | − | − | − | − | − | − | n | n | n | n | n | n | − | − | + |
| other# | − | − | − | − | − | − | n | n | n | n | n | n | − | − | − |

+ = present and verified by sequencing
* = product of the correct size present; not yet verified by sequencing
− = not detected
n = not checked
#These are: Adrenal Gland, Fetal Liver, Cerebellum, Lung, Small Intestine.

[0275] Two of the variants that are more widely expressed appear to be mutually exclusive: 4D7 [with 4D7-1 as first exon] was detected in 10 cDNAs while RT14 is found in 9cDNAs. Of these thyroid and prostate are the only tissues common to both variants.

[0276] The 13 new RT and RACE variants presented above (we had previously described the 4D7 variant), do not add any new translated sequence. The RT1 product is expected o be the same as the 4D7 putative protein. In variants RT2 and Race6 the exons between 4D7-2 and 4D7-3 interfere with the ORF with the first AUG and ORF being just inside LF1. Similarly Exon 4D9-3 contains stop codons in all 3 reading frames and Variants RT10, 11, 12, 13, and 14 having their ATG initiation codon inside LF1. It is not clear whether variants RT4 and RT5, which contain exon 4D9-3 extend to LF1 or have their 3′ at 4D9-3 (the latter possibility is supported by the EST data).

[0277] It is noteworthy that all variants except 4D7, RT3 and RT14 have been observed only in one of the cDNAs. Although all the new exons (except 4D9-3.1) have an AG/GT splice signal, it is plausible that these variants represent rare or aberrant events with little physiological significance.

[0278] The following exons contain Alu repetitive element sequences: 4D7-5 and 4D7-C. The gene specific reverse (3′) primer was designed for PDE4D exon LF1 (5′ GGCAATGGAGGAGTTCCGGGACA TA-3′; SEQ ID NO: 87 origin from Homo sapiens).

[0279] A contig for the incomplete genomic sequence of the PDE4D gene was submitted by others in November 2000 (GenBank entry NT_{—}023193 by International Human Genome Project collaborators). The size of the contig is 614 481 bp (including gaps) whereas our novel genomic sequence for the whole PDE4D region (i.e., from the first exon for PDE4D variant) is close to 1,690,000 bp and contains no gaps. The contig NT_{—}023193 comprises only 11 exons of the PDE4D gene (in FIG. 3, exons 4D 1/D2-11) and the 5′ differently spliced exons are missing in the contig (in FIG. 3, exons D4, D5, D3, D8, D9, D7A-1, D7A-2, D7A-3, LF1, LF2, LF3 and LF4).

TABLE 13
New Isoforms

| Isoform | | | | |
|---|---|---|---|---|
| Name | Exon | | Size | Cell line |
| PDE4D7 | D7-1 | 5′ | 122 bp | SKNAS |
| PDE4D7 | D7-2 | Internal | 131 bp | SKNAS |
| PDE4D7 | D7-3 | Internal | 230 bp | SKNAS |
| PDE4D9¹ | D9 | 5′ | 782 bp | HeLa |

¹Formerly referred to in previous applications as PDE4D8

[0280] The sequences are as follows:

| | |
|---|---|
| D7A-1: | |
| ATAGTTGGCGTACCCTGAGGCCTGCCAGTTCCTGCCTTAATGCATATGTAGT | |
| CGTAATTGAGTTCTGACACGGCCTTGGATGTTTCTGTCCTAAATAGCTGACA | |
| TTGCATCTTCAAGACTGT | |
| D7A-2: | |
| CATTCCAGTTGGCTTTTGAGTGGATACGTGCAGTGAGATCATTGACACTGGA | |
| AACACTAGTTCCCATTTTAATTACTTAAAACACCACGATGAAAAGAAATAC | |
| CTGTGATTTGCTTTCTCGGAGCAAAAGT | |
| D7A-3: | |
| GCCTCTGAGGAAACACTACATTCCAGTAATGAAGAGGAAGACCCTTTCCGC | (SEQ ID NO: 11; includes D7A-1, D7A-2 and |
| GGAATGGAACCCTATCTTGTCCGGAGACTTTCATGTCGCAATATTCAGCTTC | D7A-3) |
| CCCCTCTCGCCTTCAGACAGTTGGAACAAGCTGACTTGAAAAGTGAATCAG | |
| AGAACATTCAACGACCAACCAGCCTCCCCCTGAAGATTCTGCCGCTGATTGC | |
| TATCACTTCTGCAGAATCCAGTGG | |

[0281] New predicted amino-terminal protein sequence from above (PDE4D7):

| | |
|---|---|
| MKRNTCDLLSRSKSASEETLHSSNEEEDPFRGMEPYLVRRLSCRNIQLPPLAFRQ | (SEQ ID NO: 12) |
| LEQADLKSESENIQRPTSLPLKILPLIAITSAESS (90 amino acids) | |
| D9: | |
| TTCTCACTGCCCTGCGGTGTTTTGAACTGCCTTCTTACAGACGTCATACAGC | (SEQ ID NO: 13) |
| CCTTGAGGAATAGTTTCTGCCTGGTGAGATTGAATGATAGTTCTCATTCACA | |
| AAACCCTGGATTCTAAGCAGGGACACACAGAAATTACTTTCGCAGGTAAAT | |
| CAGCCCACCCAGCCAAAGTGTGGAGAGATTTGTTCCTTGGCTGACTTCTTTG | |
| CTCCACGGAGAGGAGTGTTTTCCTGTGCTTGCCCTGAAATGGAACTTCCTTG | |
| ACAGCTCTCCCGTGTTACAGTACCTCCCGGTCATTTTCTTTTTCTCTCTCTCT | |
| ACCTGCGCTCTTCGAGTGTCAGAAACCTTTAAAGCTGTTACTATGGAATTGC | |
| AAAAAAGAGATCAAGTGACTCTTTCACTATGCTGGTTTCCCTTGTGACCCAG | |
| ATGAAGAATCAATTCAGAATTCAGTTCCTCCCTTGGCATTGCAAGACACAG | |
| AAGAAACTGTCACTTCCTAACAGCCTAGTACTGGAGTAAATTCAGTATGAA | |
| GGAAGAAAGCGCTCCTGCGTGTTAGAACCTTGCCCATGAGCTGGACCGAGG | |
| ACAGGAGATGGACTCCAGGAAAATTGGATTTCTTCAAGCAGCCTCCCTTGG | |
| AAATGGAATATCTTTAAAATCTTCTTTGCAGAAAGACAGTTAGAATGTATTA | |
| ATCAGAATAGTTGAAGACTTATTTTCCTTTTTATTTTTTTTCAAAATGAGCAT | |
| TATTATGAAGCCAAGATCCCGATCTACAAGTTCCCTAAGGACTGCAGAGGC | |
| AGTTTG | |

New predicted amino-terminal protein sequence from above (PDE4D9):

[0282] MSIIMKPRSRSTSSLRTAEAV (21 amino acids) (SEQ ID NO: 14).

TABLE 11
Publically Available SNPS; SNP ID No. from NCBI Database

| | | | | | |
|---|---|---|---|---|---|
| rs286155 | rs27960 | rs27221 | rs149079 | rs789615 | rs37708 |
| rs286156 | rs27564 | rs27653 | rs149324 | rs401207 | rs37709 |
| rs2061250 | rs27565 | rs26955 | rs153067 | rs364917 | rs789389 |
| rs286150 | rs26948 | rs26956 | rs40354 | rs404202 | rs1423247 |
| rs206789 | rs40131 | rs153031 | rs26951 | rs440607 | rs874768 |
| rs1823062 | rs26949 | rs185190 | rs153029 | rs411255 | rs2042315 |
| rs1823063 | rs26950 | rs37762 | rs27223 | rs615429 | rs918590 |
| rs1445852 | rs26954 | rs37761 | rs27222 | rs789396 | rs918591 |
| rs766119 | rs26953 | rs1423471 | rs251726 | rs37684 | rs918592 |
| rs956721 | rs152324 | rs27224 | rs1862589 | rs1445893 | rs1115372 |
| rs248910 | rs35385 | rs1645013 | rs702556 | rs37685 | rs1345782 |
| rs248912 | rs40512 | rs1423472 | rs702554 | rs1086121 | rs1363862 |
| rs187481 | rs35386 | rs27220 | rs441391 | rs42222 | rs1423248 |
| rs153152 | rs35387 | rs1423473 | rs446883 | rs37707 | rs1423246 |
| rs1862614 | rs1995780 | rs1435077 | rs159624 | rs1008709 | rs298088 |
| rs2194256 | rs1508865 | rs1369287 | rs1159470 | rs1027747 | rs298087 |
| rs889305 | rs952110 | rs1017410 | rs159622 | rs869685 | rs1421401 |
| rs2113071 | rs1533019 | rs1017409 | rs256349 | rs869686 | rs298086 |
| rs2113072 | rs2117552 | rs1435076 | rs256348 | rs924880 | rs298085 |
| rs966220 | rs1545069 | rs1435075 | rs1501640 | rs1504983 | rs298084 |
| rs966221 | rs1545070 | rs1435074 | rs600611 | rs1504982 | rs298083 |
| rs719702 | rs973700 | rs978455 | rs159621 | rs877745 | rs298073 |
| rs2113073 | rs1583434 | rs1827340 | rs159625 | rs877744 | rs298072 |
| rs2113074 | rs1347401 | rs1393083 | rs1435072 | rs2164661 | rs298071 |
| rs2113075 | rs1949017 | rs988364 | rs173945 | rs981230 | rs1421400 |
| rs1035512 | rs723962 | rs1017408 | rs256356 | rs1437124 | rs402874 |
| rs1559277 | rs1355099 | rs2053155 | rs185351 | rs746477 | rs434368 |
| rs1981848 | rs1396473 | rs181923 | rs256355 | rs893191 | rs371011 |
| rs1544788 | rs1369285 | rs1546364 | rs2067024 | rs1992112 | rs298063 |
| rs1544790 | rs1435071 | rs173942 | rs256354 | rs298102 | rs298062 |
| rs1544791 | rs1435070 | rs159616 | rs173944 | rs298101 | rs298061 |
| rs851284 | rs1435083 | rs159620 | rs256353 | rs2164660 | rs298060 |
| rs1396476 | rs991551 | rs1501641 | rs986400 | rs298100 | rs298057 |
| rs1508860 | rs1154790 | rs159619 | rs1504981 | rs298098 | rs298056 |
| rs1974850 | rs1154789 | rs159614 | rs1120533 | rs298096 | rs1370230 |
| rs2136203 | rs714291 | rs159613 | rs256351 | rs298095 | rs297975 |
| rs2174994 | rs981760 | rs159612 | rs190458 | rs298094 | rs297974 |
| rs1508863 | rs1369288 | rs159611 | rs256352 | rs298093 | rs379578 |
| rs1508859 | rs977418 | rs194368 | rs171745 | rs1362942 | rs920190 |
| rs1508864 | rs977417 | rs661576 | rs1157709 | rs1362941 | rs1865962 |
| rs1396474 | rs977416 | rs299627 | rs1910790 | rs298091 | rs298018 |
| rs1543951 | rs1529843 | rs159608 | rs1910789 | rs298090 | rs298021 |
| rs2016324 | rs1529842 | rs159609 | rs1504985 | rs298089 | rs298022 |
| rs298023 | rs2053229 | rs296406 | rs697076 | rs37575 | rs1824154 |
| rs298024 | rs295974 | rs296405 | rs294478 | rs37576 | rs2112911 |
| rs298025 | rs295973 | rs295948 | rs953302 | rs1876209 | rs1551564 |
| rs298026 | rs295972 | rs295947 | rs294479 | rs190486 | rs2034895 |
| rs298027 | rs295971 | rs295946 | rs697075 | rs447261 | rs2081092 |
| rs298028 | rs295970 | rs295945 | rs294481 | rs1506558 | rs2112910 |
| rs298029 | rs295969 | rs295944 | rs294482 | rs1108916 | rs918583 |
| rs298030 | rs295968 | rs1395334 | rs294483 | rs921942 | rs1840838 |
| rs169868 | rs295966 | rs295943 | rs702545 | rs924998 | rs1350298 |
| rs177077 | rs726652 | rs1035321 | rs294484 | rs176705 | rs1990985 |
| rs298032 | rs295965 | rs294494 | rs294485 | rs1156029 | rs1379297 |
| rs298033 | rs1307218 | rs722923 | rs294486 | rs1156028 | rs1817248 |
| rs298034 | rs1307217 | rs294495 | rs702544 | rs931857 | rs244569 |
| rs298035 | rs893190 | rs294496 | rs702543 | rs931856 | rs244568 |
| rs298042 | rs1111495 | rs294497 | rs159194 | rs931855 | rs244567 |
| rs298044 | rs295961 | rs294498 | rs40215 | rs1506557 | rs244565 |
| rs298045 | rs295960 | rs294499 | rs291118 | rs462930 | rs185417 |
| rs298046 | rs295959 | rs294500 | rs1506560 | rs458953 | rs258128 |
| rs298048 | rs295958 | rs294501 | rs37569 | rs174039 | rs258127 |
| rs298049 | rs296410 | rs294503 | rs291119 | rs2174624 | rs258125 |
| rs298050 | rs295957 | rs295936 | rs37571 | rs2135480 | rs1348710 |
| rs298051 | rs295956 | rs1395336 | rs1870077 | rs992726 | rs1348709 |
| rs298052 | fs295955 | rs1395337 | rs159195 | rs294474 | rs1971061 |
| rs298053 | rs295954 | rs294492 | rs37572 | rs294475 | rs1541673 |
| rs190936 | rs295949 | rs159196 | rs37573 | rs988827 | rs1541672 |
| rs298017 | rs295980 | rs159197 | rs167161 | rs988828 | rs258112 |
| rs298016 | rs295979 | rs172362 | rs37574 | rs1350297 | rs258111 |
| rs298015 | rs295978 | rs37579 | rs1506562 | rs1457110 | rs171800 |
| rs298014 | rs1154587 | rs721784 | rs291122 | re1457111 | rs187716 |
| rs258110 | rs424839 | rs1118965 | rs35266 | rs255652 | rs26709 |
| rs258109 | rs370891 | rs154028 | rs39672 | rs255650 | rs26710 |
| rs258108 | rs434183 | rs151802 | rs958851 | rs255649 | rs28055 |
| rs258107 | rs444552 | rs244580 | rs244576 | rs2194210 | rs26711 |
| rs665836 | rs433565 | rs1457145 | rs244575 | rs255648 | rs27723 |
| rs392901 | rs1445918 | rs244579 | rs244573 | rs255647 | rs27185 |
| rs383444 | rs441817 | rs255812 | rs35258 | rs154221 | rs27695 |
| rs662643 | rs433161 | rs154029 | rs35259 | rs256752 | rs1445954 |
| rs670169 | rs428059 | rs185333 | rs40121 | rs256120 | rs27549 |
| rs525099 | rs434422 | rs35289 | rs35261 | rs255635 | rs455969 |
| rs669240 | rs427433 | rs35288 | rs35264 | rs185325 | rs26712 |
| rs381755 | rs391377 | rs35287 | rs40122 | rs26686 | rs1867711 |
| rs454702 | rs414746 | rs35286 | rs35265 | rs1031197 | rs1867712 |
| rs443191 | rs187368 | rs35285 | rs35255 | rs1031198 | rs26713 |
| rs380118 | rs244593 | rs35284 | rs721826 | rs27183 | rs26714 |
| rs2168649 | rs244592 | rs35283 | rs244570 | rs28044 | rs27547 |
| rs371775 | rs244591 | rs35282 | rs27171 | rs27182 | rs26715 |
| rs378970 | rs244590 | rs35281 | rs1824159 | rs545611 | rs27949 |
| rs401013 | rs181736 | rs35280 | rs27170 | rs649476 | rs26700 |
| rs427748 | rs193447 | rs35279 | rs27169 | rs1664896 | rs1306348 |
| rs427740 | rs2028842 | rs35278 | rs27168 | rs149106 | rs35309 |
| rs378869 | rs2028841 | rs40126 | rs2013979 | rs1374028 | rs27691 |
| rs1902609 | rs1823068 | rs35277 | rs889231 | rs531105 | rs35310 |
| rs389324 | rs1823067 | rs35276 | rs2014012 | rs27184 | rs26689 |
| rs387647 | rs1823066 | rs35275 | rs37353 | rs1445951 | rs27187 |
| rs377451 | rs244588 | rs40125 | rs187645 | rs1947090 | rs1445948 |
| rs403695 | rs168641 | rs35274 | rs1809012 | rs26708 | rs26687 |
| rs403672 | rs2059175 | rs244577 | rs187644 | rs2112959 | rs166260 |
| rs372309 | rs2059174 | rs35267 | rs153981 | rs1445953 | rs149506 |
| rs27722 | rs1664886 | rs1559251 | rs1553113 | | |
| rs26695 | rs1867724 | rs1345791 | rs1353748 | | |
| rs27773 | rs1445947 | rs1345792 | rs1498606 | | |
| rs1471429 | rs42470 | rs1345793 | rs1353747 | | |
| rs1471430 | rs1423308 | rs1105577 | rs1006431 | | |
| rs26705 | rs27174 | rs1960 | rs1948651 | | |
| rs28054 | rs168834 | rs1824788 | rs1498605 | | |
| rs26703 | rs27727 | rs1862563 | rs1498604 | | |
| rs27898 | rs27172 | rs1551939 | rs1498603 | | |
| rs722010 | rs676449 | rs1038080 | rs1995166 | | |
| rs27957 | rs27186 | rs997421 | rs1498602 | | |
| rs26702 | rs2112957 | rs1014317 | rs1077183 | | |
| rs27548 | rs1023814 | rs2059191 | rs1078368 | | |
| rs26701 | rs27175 | rs1551938 | rs1874857 | | |
| rs27188 | rs1445950 | rs1186170 | rs1874858 | | |
| rs27189 | rs2021384 | rs986067 | rs1909294 | | |
| rs149084 | rs736736 | rs954740 | rs1546221 | | |
| rs153968 | rs745813 | rs1363882 | rs2055295 | | |
| rs464787 | rs889229 | rs1353749 | rs1391648 | | |
| rs153978 | rs1077978 | rs1391651 | rs2055298 | | |
| rs464311 | rs2081106 | rs1391650 | rs1472456 | | |
| rs149108 | rs1559252 | rs1391649 | rs1553114 | | |
| rs153980 | rs2054443 | rs1391652 | rs1542842 | | |
| rs153961 | rs922437 | rs950446 | rs1498611 | | |
| rs1867725 | rs922436 | rs950447 | rs1532520 | | |
| rs153965 | rs922435 | rs1498599 | | | |
| rs153966 | rs922434 | rs1498601 | | | |
| rs1988803 | rs716908 | rs1498609 | | | |
| rs467300 | rs1971940 | rs1498608 | | | |

[0283] TABLE 12
New SNPs identified by deCODE

| Position | Variation | AA Change | Exon |
|---|---|---|---|
| 135641 | T/A | | |
| 142780 | A/G | | |
| 732790 | G/T | | |
| 735966 | C/A | | |
| 736226 | A/G | | |
| 736516 | C/T | | |
| 850001 | G/A | | |
| 852776 | A/C | | |
| 853079 | G/T | | |
| 853575 | C/A | | |
| 856468 | A/G | | |
| 860845 | A/G | | |
| 870924 | A/G | | |
| 1027267 | T/C | | |
| 1027643 | T/G | | |
| 1027757 | T/C | | |
| 1028146 | T/A | | |
| 1037657 | A/C | | |
| 1044016 | G/A | | |
| 1044045 | C/T | | |
| 1254737 | T/C | | |
| 1254849 | T/C | | |
| 1255763 | G/T | | |
| 1257206 | A/G | | |
| 1258161 | T/C | | |
| 1268007 | A/G | | |
| 1268187 | C/T | | |
| 1268553 | A/G | | |
| 1272669 | G/A | | |
| 1272910 | A/G | | |
| 1273023 | G/A | | |
| 1273220 | A/G | | |
| 1273240 | A/G | | |
| 1273543 | C/T | | |
| 1288439 | G/A | | |
| 1289730 | T/A | | |
| 1290176 | G/A | | |
| 1293745 | T/C | | |
| 1344605 | A/G | | |
| 1344864 | G/A | | |
| 1345135 | C/G | | |
| 1345286 | A/G | | |
| 1346112 | C/T | | |
| 1352976 | A/T | | |
| 1354291 | T/C | | |
| 1354377 | C/T | | |
| 1354554 | C/A | | |
| 1354675 | T/C | | |
| 1355114 | T/C | | |
| 1355693 | A/G | | |
| 1357081 | A/G | | |
| 1362985 | T/G | | |
| 1363021 | C/T | | |
| 1363827 | C/T | | |
| 1363911 | G/A | | |
| 1364061 | C/T | | |
| 1364066 | T/A | | |
| 1367904 | A/G | | |
| 1368193 | T/C | | |
| 1368217 | G/C | | |
| 1373349 | C/T | | |
| 1373384 | A/G | | |
| 1373415 | T/C | | |
| 1373979 | T/G | | |
| 1376149 | G/A | | |
| 1384931 | A/C | | |
| 1385093 | A/T | | |
| 1385107 | G/A | | |
| 1385445 | T/C | | |
| 1391418 | G/C | | |
| 1409210 | C/A | | |
| 1414804 | C/T | | |
| 1428284 | T/C | | |
| 1431800 | A/T | | |
| 1449904 | A/T | | |
| 1574301 | C/G | | |
| 1574615 | C/T | | |
| 1575634 | A/T | | |
| 1580088 | G/A | | |
| 1581078 | G/A | | |
| 1582418 | T/A | | |
| 1584580 | A/C | | |
| 1585955 | G/T | | |
| 1590608 | T/C | | |
| 1590672 | A/G | | |
| 1590673 | G/T | | |
| 1590837 | G/A | | |
| 1590936 | C/A | | |
| 1591011 | G/A | | |
| 1591047 | C/T | | |
| 1591306 | C/A | Pro −> Thr | D1 |
| 1591583 | T/C | | |
| 1594788 | C/A | | |
| 1594994 | G/A | | |
| 1601831 | C/T | | |
| 1636902 | T/C | | |
| 1638550 | A/C | Lys −> Thr | exon 4 |
| 1640663 | T/C | | |
| 1641954 | C/T | | |
| 1641960 | C/T | | |
| 1653881 | G/A | | |
| 1655748 | G/A | | |
| 91470 | G/A | | |

Discussion of Example 2:

[0284] Here we present the first complete genomic sequence of human PDE4D, two novel mRNA/protein isoforms of PDE4D and their corresponding exons, and the intron-exon structure of known and novel isoforms. The basis for phosphodiesterases is the mammalian homolog of the “dunce” gene in Drosophila melanogaster, implicated in learning and memory (Davis, R. L. and B. Dauwalder, Trends Genet., 7 (7): 224-229 (1991)). PDEs are members of a large superfamily of isoenzymes subdivided into 9 and possibly 10 distinct families (Conti, M. and S. L. Jin, Prog. Nucleic Acid Res. Mol. Biol., 63: 1-38 (1999)), with several genes in each family and more than one isoform for each gene. The significance of the diversity of PDEs is not known but many of the isoforms differ in their biochemical properties, phosphorylation, intracellular targeting, protein-protein interactions and patterns of expression in tissues, which suggests that each of the various isoforms might have distinct functions (Bolger, G. B., Cell Signal, 6 (8): 851-859 (1994); Conti, M., et al., Endocr. Rev., 16 (3): 370-378 (1995)).

[0285] There are four genes that encode the type 5 PDEs (PDE4A, PDE4B, PDE4C and PDE4D), which is a group of enzymes characterized by high affinity for cAMP. The gene for PDE4D was assigned to human chromosome 5q12 (Milatovich, A., et al., Somat. Cell Mol. Genet., 20 (2): 75-86 (1994); Szpirer, C., et al., Cytogenet. Cell Genet., 69 (1-2): 22-14 (1995)) and 5 distinct splice variants have been characterized (the short forms PDE4D1, PDE4D2 and the long forms PDE4D3, PDE4D4, and PDE4D5) (Bolger, G. B., et al., Biochem. J., 328 (Pt. 2): 539-548 (1997)) (FIG. 3). The sequence of the human PDE4D variants show a high degree of homology to the PDE4Ds expressed in mouse and rat. The pattern of splicing and different promoter usage is highly conserved during evolution indicating an important physiological role (Nemoz, G., et al., FEBS Lett., 384 (1): 97-102 (1996)). The PDE4D variants are generated at two major boundaries present in the gene. The first boundary corresponds to the junction of exon 2. Differential splicing in this region generates the 2 short variants PDE4D1 (586 a.a.) and PDE4D2 (508 a.a.) (FIG. 3). This splicing boundary is conserved in mouse, rat and between different human PDE4 genes. The splicing variant PDE4D2 is generated by the removal of 256 bp from the PDE4D1 sequence. The initiation codon in the PDE4D2 variant lies within exon D1/D2. Data demonstrates that the expression of the short PDE4D variants is under the control of an internal promoter regulated by cAMP (Vicini, E. and M. Conti, Mol. Endocrinol., 11 (7): 839-850 (1997)). The second major splicing boundary is also conserved during evolution and is identical to that described in the Drosophila dunce gene. Splicing occurs at the intron/exon boundary at the LF1 exon (FIG. 3).

PDE Function

[0286] The PDEs serve at least four major functions in the cell. They can (1) act as effector of signal transduction by interacting with receptors and G-proteins; (2) integrate the cyclic nucleotide-dependent pathway with other signal transduction pathways; (3) function as homeostatic regulators, playing a role in feedback mechanisms controlling cyclic nucleotide levels during hormone and neurotransmitter stimulation; (4) play an important role in controlling the diffusion of cyclic nucleotides and in creating subcellular domains or channeling cyclic nucleotide signaling (Conti, M. and S. L. Jin, Prog. Nucleic Acid Res. Mol. Biol., 63: 1-38. (1999)). Inhibition of PDE has long been recognized as an effective pharmacological strategy to alter intracellular cyclic nucleotide levels (Flamm, E. S., et al., Arch. Neurol., 32 (8): 569-71 (1975)).

[0287] It has been reported that PDE4 is the predominant isozyme regulating vascular tone mediated by cAMP hydrolysis in cerebral vessels (Willette, R. N., et al., J. Cereb. Blood Flow Metab., 17 (2): 210-9 (1997)).

[0288] A recent study on mice with targeted disruption of PDE4D gene (Hansen, G., et al., Proc. Natl. Acad. Sci. USA, 97 (12): 6751-6 (2000)) has demonstrated a crucial role of PDE4D in the control of smooth muscle contraction and muscarinic cholinergic receptor signaling but not in the control of airway inflammation. The lung phenotype of the PDE4D−/− mice demonstrates that this gene plays a nonredundant role in cAMP homeostasis. There is a significant reduction in PDE activity and an increase in resting and stimulated cAMP levels in the lung, indicating that other PDE4s (or other PDEs) are not up-regulated and cannot compensate for the loss of PDE4D. These findings support that PDE4D serves a unique, nonoverlapping functions in cell signalling.

[0289] No clear link between an established inherited disorder and known PDE loci has emerged, with the exception of PDE6. Inhibitors of PDEs have been shown to affect airway responsiveness and pulmonary allergic inflammation (Schudt, C., et al., Pulm. Pharmacol. Ther., 12 (2): 123-9 (1999)). There are reports suggesting that altered PDE4 function may be linked to nephrogenic diabetes insipidus (Takeda, S., et al., Endocrinology, 129 (1): 287-94 (1991)) or atopic dermatitis (Chan, S. C., et al., J. Allergy Clin. Immunol., 91 (6): 1179-88 (1993)), however no mutations have been identified. It has also been reported that vasorelaxation modulated by PDE4 (not mentioned whether it is Λ, B, C or D gene family) is compromised in chronic cerebral vasospasm associated with subarachnoid hemorrhage (Willette, R. N., et al., J. Cereb. Blood Flow Metab., 17 (2): 210-9 (1997)). PDE4D itself has not been linked to stroke before.

PDE4D Expression and Cellular Localization

[0290] PDE4Ds are expressed in human peripheral mononuclear cells (Nemoz, G., et al., FEBS Lett, 384 (1): 97-102 (1996)), brain (Bolger, G., et al., Mol. Cell Biol., 13 (10): 6558-71 (1993)), heart (Kostic, M. M., et al., J. Mol. Cell Cardiol., 29 (11): 3135-46 (1997)) and vascular smooth muscle cells (Liu, H. and D. H. Maurice, J. Biol. Chem., 274 (15): 10557-65 (1999)).

[0291] Immunoblotting of rat brain has shown that the PDE4D3, PDE4D4 and PDE4D5 proteins are present in brain (Bolger, G. B., et al., Biochem. J, 328 (Pt 2): 539-48 (1997)) and are expressed in cortex and cerebellum from rat (Iona, S., et al., Mol. Pharmacol., 53 (1): 23-32 (1998)). These proteins were recovered mostly or exclusively in the particulate fraction suggesting that these forms may be targeted to insoluble cellular structures. In addition a 68 kDa protein was detected which could represent PDE4D 1, PDE4D2 or both. To verify this RT-PCR was performed on mRNA from rat brain and the results showed that transcripts for PDE4D1 and 2 were present. Their data also suggests that the N-terminal regions of the PDE4D3-5, derived from alternatively spliced regions of their mRNAs, are important in determining their subcellular localization activity and differential sensitivity to inhibitors and there are indications that there is a propensity for the long PDE4D isoforms to interact with particulate fraction of the cell.

### Example 3

### PDE4D Isoform Expression

Expression Analysis in EBV Transformed B Cell Lines

[0292] As a functional mutation in the known coding exons of PDE4D was not identified, gene expression was next studied to determine if the genetic association to stroke relates to regulation of its expression levels. In order to test this, we chose to use cell lines instead of blood or tissues for these studies because expression analysis of cell lines is not confounded by the presence of multiple cell types. Cell types may express PDE4D at different levels so it is generally more reliable to quantify expression in cell lines than tissues. Isoform-specific kinetic PCR analysis was carried out on EBV transformed B cell lines to quantify each isoform in 83 stroke patients and 84 controls. These patients were not selected for this analysis based on any specific subtype of stroke. The majority of the patients had ischemic stroke and 38% of them had carotid or cardiogenic cause of stroke. Overall the total PDE4D message level as assessed by amplification across exons present in all isoforms (PAN), was significantly lower in patients than in controls (p value<0.005). This decrease was due primarily to lower expression of the isoforms, PDE4D1, PDE4D2 and PDE4D5 (FIG. 4).

[0293] We selected individuals with a specific stroke associated haplotype and compared the expression levels of carrier vs. non-carriers of this haplotype and with patients and controls examined separately (FIGS. 5 and 6). The haplotype was constructed out of the at-risk allele for the microsatellite marker AC008818-1 and SNP45 (SNP5PDM357221) and SNP41 (SNP5PDM361545). This haplotype acts as a surrogate for the disease-associated haplotype we have identified in LD block B (Table 3). Patients with the haplotype had a significantly decreased expression of the PDE4D7 and PDE4D9 isoforms (FIG. 5). Several other isoforms of PDE4D were expressed but did not show correlation to the disease haplotype. The PDE4D7 correlation was also present in controls but only marginally significant (FIG. 6). Of interest, this at-risk haplotype covers the 5′ exon specific to PDE4D7 and presumably its promoter.

[0294] These results show that there is significant disregulation of the expression of multiple PDE4D isoforms in stroke patients.

Methodology for Expression Analysis using Quantitative Reverse Transcriptase PCR

[0295] Total RNA was isolated from EBV transformed B-cell cultures according to manual, using the TRIZOL® reagent provided by GibcoBRL. RNeasy mini Qiagen kit with on column DNA digestion was used to clean RNA. Quality and quantity of RNA was assessed using 2100 Agilent Bioanalyser. cDNA was prepared from total RNA using random hexamers with TaqMan Reverse Transcription Reagents kit from Applied Biosystems (N808-0234). Primer Express 2.0 and Oligo 6 software were used to make cDNA specific primers and probes for PDE4D and PDE4D isoforms. GAPDH “Assay-On-Demand” was obtained from Applied Biosystems and used as a housekeeping gene. PDE assays were tested and optimized for 384 well high throughput expression analysis using ABI 7900 Instrument. A final concentration of 200 nM probes, 900 nM primers and 2 ng/mcl cDNA was used in a 10 mcl reaction volume. Each plate was run twice and an average for each sample calculated. ABI7900 instrument was used to calculate CT (Threshold Cycle) values. Samples displaying a greater than 1 deltaCT between duplicates were not used in our analysis. Quantity was obtained using the formula 2^{-ΔCT} where ΔCT represents the difference of CT values between target and housekeeping assay.

[0296] Accession numbers AY245866 (PDE4D7) and AY245867 (PDE4D9).

Discussion of the Three Examples and Conclusions:

[0297] Our results indicate that genetic variation in the PDE4D gene is associated with ischemic stroke. The direct involvement of PDE4D is strongly supported by linkage in conjunction with association and expression analysis. We first identified the association using microsatellite markers, and supplementing the microsatellite data with a denser set of SNPs further supported this. The strongest association is to the two ischemic subtypes, carotid and cardiogenic stroke whereas we did not observe association to small vessel occlusive disease, the form of stroke thought to be independent of atherosclerosis. Although we have not identified a functional mutation in the PDE4D gene, we have identified a haplotype, that extends over the first exon of PDE4D that is significantly associated to carotid and cardiogenic stroke. This haplotype is present in 47% of the carotid/cardiogenic stroke patients, compared to 21% in the control group with more than two-fold stroke risk for the carriers of this haplotype. It has a population attributed risk of 25%. For the combined cardiogenic and carotid subtype of stroke, apart from finding individual SNP and microsatellite alleles that are significantly associated with the disease even after adjusting for multiple comparison, most interesting is the discovery that haplotypes covering the first exon of PDE4D can be classified into three groups with clearly distinct risks. Relative to the protective group, the population attributed risk of the at-risk and wild type groups combined is estimated to be 55%. Approximately 16% of the population carries one copy of the at-risk haplotype in FIG. 12.3. They have about 1.8 times the risk of the general population for getting cardiogenic or carotid stroke. Approximately 0.8% of the population is homozygous for the at-risk haplotype and, assuming the multiplicative model, their risk is estimated to be about 3.8 times the risk of the general population. It is true that we have not yet identified or proved convincingly what is the functional variant, or variants, which are responsible for the observed effects of these haplotype groups. And, since these haplotype groups do not fully explain the linkage signal we observe in the region for all stroke patients, we certainly could not rule out, and indeed expect, that there are other variants/haplotypes within PDE4D not directly related to those we have identified that confer risk to stroke. These are likely to be rare but could have very high penetrance. We also cannot rule out the possibility that some other genes in the linkage region independent of, or in conjunction with, PDE4D confer susceptibility to stroke.

[0298] We examined whether the disease associated alleles and haplotype are related to specific stroke risk factors such as hypertension, hypercholesterolemia, diabetes, peripheral artery occlusive disease and coronary artery disease in addition to each onset of stroke and gender (Table 8). A marginally significant association to hypercholesterolemia was observed but it is clear that PDE4D's contribution to stroke is not strongly correlated with any of these known risk factors.

[0299] The PDE4D gene is a highly complex gene. By alternative splicing and use of different promoters this gene generates at least 8 different isoforms that yield functional proteins, differing from each other in their N-terminal regions. We have identified four new exons encoding the N-termini of two new isoforms PDE4D7 and PDE4D9. The disease-associated haplotype extends over the 5′exon unique to the new PDE4D7 variant and the presumed promoter region of this isoform suggesting that the functional variation may be involved in transcriptional regulation. This hypothesis is also supported by our PDE4D expression analysis that shows significant correlation between the disease associated haplotype and the level of PDE4D7 message.

[0300] The strongest association found for this PDE4D haplotype was to the two major subtypes of ischemic stroke, carotid and cardiogenic stroke, suggesting a role for this gene in the vascular biology of atherosclerosis. While there are multiple etiologies for ischemic stroke, atherosclerosis remains the most important one and it is the major pathological process for the two ischemic subtypes, carotid and cardiogenic strokes. First, it is the major cause of stenotic and occlusive lesions of the internal and common carotids that lead to carotid strokes. Second, cardiac thrombi which shed emboli to the brain most commonly occur on the background of coronary artery disease, such as following acute myocardial infarction or ischemic cardiomyopathy, and/or due to atrial fibrillation on the basis of poor compliance of ischemic ventricles (diastolic dysfunction/stiffening). Although atrial fibrillation may occur on the background of other diseases such as valvular disease, hyperthyroidism, and hypertension, in the age group that tends to suffer from stroke, ischemic heart disease remains one of the most important causes. Ischemic stroke resulting from occlusion of small penetrating arteries within the brain (small vessel occlusive disease or lacunar stroke) is generally thought to result from endothelial proliferation since atherosclerosis only occurs in larger arteries. PDE4D does not show association to small vessel stroke, consistent with its role in atherosclerosis. Carotid and cardiogenic stroke together account for the majority of ischemic stroke (note that our number for carotid is lower since we used a more stringent cutoff of stenosis).

[0301] PDE4D selectively degrades second messenger cAMP (Kong, A. et al., Nat Genet 10, 10 (2002)), which plays a central role in signal transduction and regulation of physiological responses. It is expressed in most cell types important to the pathogenesis of atherosclerosis, including vascular smooth muscle cells (VSCM), endothelial cells, monocytes, macrophages and T-lymphocytes (Houslay, M. D. and Adams, D. R., Biochem J 370, 1-18 (2003); Liu, H. and Maurice, D. H., J Biol Chem 274, 10557-65. (1999); Liu, H. et al., J Biol Chem 275, 26615-24. (2000); Baillie, G., et al., Mol Pharmacol 60, 1100-11. (2001); Jin, S. L. and Conti, M., Proc Natl Acad Sci USA 99, 7628-33. (2002)). Cyclic AMP is a key signalling-molecule in these cells (Landells, L. J. et al., Br J Pharmacol 133, 722-9 (2001); Fukumoto, S. et al., Circ Res 85, 985-91. (1999); Ogawa, S. et l., Am J Physiol 262, C546-54 (1992)). In VSMC, low cAMP levels lead to an increase in proliferation and migration that at least in part is mediated by PDE4 (Landells, L. J. et al., Br J Pharmacol 133, 722-9 (2001); Stelzner, T. J., et al., J Cell Physiol 139, 157-66 (1989); Pan, X., et al., Biochem Pharmacol 48, 827-35. (1994)). Animal models have also shown that elevation of cAMP reduces neointimal lesion formation and inhibits proliferation of SMCs after arterial injury (Palmer, D., et al., Circ Res 82, 852-61. (1998); Indolfi, C. et al., Nat Med 3, 775-9. (1997)). In monocytes and T-lymphocytes, accumulation of cAMP is generally associated with inhibition of immune functions such as proliferation and cytokine secretion (Indolfi, C. et al., J Am Coll Cardiol 36, 288-93. (2000)). It is attractive to postulate that the regulation of cAMP through absolute or relative expression of one or more PDE4D isoforms may differ in individuals susceptible to stroke; some stroke patients may have increased PDE4D activity and, consequently lower cAMP levels in any of the above cell types, leading to development of the atherosclerotic plaque and/or its instability. However, contrary to what one might expect we see decreased expression in some of the PDE4D isoforms in EBV cell lines from stroke patients. It is of interest that these isoforms are all up regulated by cAMP (Liu, H. and Maurice, D. H., J Biol Chem 274, 10557-65. (1999); Tilley, S. L., et al., J Clin Invest 108, 15-23 (2001); Vicini, E. and Conti, M., Mol Endocrinol 11, 839-50 (1997)) suggesting disregulation at the level of cAMP in patients. It is therefore possible that increased activity of one or few splice variants alters the effective PDE4D enzymatic activity of the cell decreasing the cAMP levels thus altering the expression of cAMP regulated isoforms as observed in our expression study. This relative expression of PDE4D isoforms may determine the compartmental localization of PDE4D isoforms and thus the corresponding gradients of intracellular cAMP that have been recently observed (see Housley review).

[0302] In summary, we have presented association analyses (single marker and haplotype analyses) that support the notion that the PDE4D gene confers risk to ischemic stroke. Furthermore, we have observed significant disregulation of multiple PDE4D isoforms in stroke patients. We propose that this gene is involved in the pathogenesis of stroke through atherosclerosis. PDE4D is expressed in cell types important in atherosclerosis and regulates a second messenger with a central role to processes important in the pathogenesis of atherosclerosis. Inhibition of PDE4D in general or specifically one or more isoforms, by a small molecule drug or other pharmacological agent might decrease the risk of stroke in general, and especially those who are predisposed to stroke through variation in the PDE4D gene.

[0303] While this invention has been particularly shown and described with reference to preferred embodiments thereof, it will be understood by those skilled in the art that various changes in form and details may be made therein without departing from the spirit and scope of the invention as defined by the appended claims.

1. A method of diagnosing susceptibility to a stroke in an individual, comprising screening for an at-risk haplotype in the phosphodiesterase 4D gene that is more frequently present in an individual susceptible to stroke compared to a healthy individual, wherein the at-risk haplotype increases risk of stroke significantly.

2. The method of claim 1 wherein the significant increase is at least about 20%.

3. The method of claim 1 wherein the significant increase is identified as an odds ratio of at least about 1.2.

4. A method of diagnosing susceptibility to stroke in an individual, comprising screening for an at-risk haplotype in the phosphodiesterase 4D gene that is more frequently present in an individual susceptible to stroke (affected), compared to the frequency of its presence in a healthy individual (control), wherein the presence of the at-risk haplotype is indicative of a susceptibility to stroke.

5. The method of claim 4 wherein the at risk haplotype 1 is characterized by the presence of G at nucleic acid position 142780, relative to SEQ ID NO: 1 and allele 0 of microsatellite marker AC0088181-1.

6. The method of claim 4 wherein the at risk haplotype 2 is characterized by the presence of G T A A C C A C G A A C T T A T T G A A T T T G A A at nucleic acid postions: 142780, 135112, 132562, 131865, 129361, 129360, 125304, 123426, 123312, 120628, 118914, 111781, 111252, 109301, 107849, 105225, 104552, 102977, 100795, 99035, 88614, 88456, 83119, 82244, 80127, 78552, relative to SEQ ID NO: 1 and allele 0 of microsatellite marker AC0088181-1.

7. The method of claim 4 wherein the at risk haplotype 3 is characterized by the presence of A A C A A at nucleic acid positions 138806, 131865, 129361, 120628, 91470, relative to SEQ ID NO: 1.

8. The method of claim 4 wherein screening for the presence of an at-risk haplotype within or near PDE4D that significantly correlates with haplotype 1 or stroke susceptibility.

9. The method of claim 4 wherein screening for the presence of an at-risk haplotype within or near PDE4D that significantly correlates with haplotype 2 or stroke susceptibility.

10. The method of claim 4 wherein screening for the presence of an at-risk haplotype within or near PDE4D that significantly correlates with haplotype 3 or stroke susceptibility.

11. The method of claim 4 wherein screening for the presence of an at-risk haplotype in the phosphodiesterase 4D gene comprises enzymatic amplification of nucleic acid from said individual.

12. The method of claim 11 wherein the nucleic acid is DNA.

13. The method of claim 12 wherein the DNA is mammalian.

14. The method of claim 13 wherein the DNA is human.

15. The method of claim 4 wherein screening for the presence of an at-risk haplotype in the phosphodiesterase 4D gene comprises:
(a) obtaining material containing nucleic acid from the individual;
(b) amplifying said nucleic acid; and
(c) determining the presence or absence of an at-risk haplotype in said amplified nucleic acid.

16. The method of claim 15 wherein determining the presence of an at-risk haplotype is performed by electrophoretic analysis.

17. The method of claim 15 wherein determining the presence of an at-risk haplotype is performed by restriction length polymorphism analysis.

18. The method of claim 15 wherein determining the presence of an at-risk haplotype is performed by sequence analysis.

19. The method of claim 15 wherein determining the presence of an at-risk haplotype is performed by hybridization analysis.

20. A kit for diagnosing susceptibility to stroke in an individual comprising: primers for nucleic acid amplification of a region of the phosphodiesterase 4D gene comprising an at-risk haplotype.

21. The kit of claim 20 wherein the primers comprise a segment of nucleic acids of length suitable for nucleic acid amplification a single nucleotide polymorphism at nucleic acid position 142780 respectively, relative to SEQ ID NO: 1 and allele 0 of microsatellite marker AC0088181-1.

22. The kit of claim 20 wherein the primers comprise a segment of nucleic acids of length suitable for nucleic acid amplification, selected from the group consisting of: single nucleotide polymorphism or microsatellite marker at nucleic acid position 142780, 135112, 132562, 131865, 129361, 129360, 125304, 123426, 123312, 120628, 118914, 111781, 111252, 109301, 107849, 105225, 104552, 102977, 100795, 99035, 88614, 88456, 83119, 82244, 80127, 78552, relative to SEQ ID NO: 1, allele 0 of microsatellite marker AC0088181-1. and combinations thereof.

23. The kit of claim 20 wherein the primers comprise a segment of nucleic acids of length suitable for nucleic acid amplification, selected from the group consisting of: single nucleotide polymorphism at nucleic acid position at nucleic acid position 138806, 131865, 129361, 120628, 91470, relative to SEQ ID NO: 1 and combinations thereof.

24. A method for assessing susceptibility to stroke in an individual, comprising determining PDE4D isoform expression levels in the individual compared to control, wherein a difference in isoform expression is indicative of susceptibility to stroke.

25. The method of claim 24 wherein isoform PDE4D7 and/or PDE4D9 expression is determined.

26. A method of diagnosing a susceptibility to stroke, comprising detecting an alteration in the expression or composition of a polypeptide encoded by phosphodiesterase 4D gene in a test sample, in comparison with the expression or composition of a polypeptide encoded by phosphodiesterase 4D gene in a control sample, wherein the presence of an alteration in expression or composition of the polypeptide in the test sample is indicative of a susceptibility to stroke.

27. The method of claim 26, wherein the alteration in the expression or composition of a polypeptide encoded by phosphodiesterase 4D gene comprises expression of a splicing variant polypeptide in a test sample that differs from a splicing variant polypeptide expressed in a control sample.

28. A method for preventing the occurrence of stroke in an individual in need thereof, comprising regulating a PDE4D isoform level compared to control, whereby the regulated isoform level mimics the level in a healthy individual.

29. The method of claim 28 wherein isoform level is regulated by regulating expression of the isoform using a phosphodiesterase 4D gene binding agent, a phosphodiesterase 4D gene receptor, a peptidomimetic, a fusion protein, a prodrug, an antibody or a ribozyme.

30. The method of claim 28 wherein the isoform level is controlled by genetically altering the isoform's expression level.

31. The method of claim 28 wherein the isoform level is regulated by altering the ratio of isoforms.

32. The method of claim 28 wherein isoform PDE4D7 and/or PDE4D9 is regulated.

33. A method for monitoring the effectiveness of treatment on the regulation of expression of one or more PDE4D isoforms at the RNA or protein level, or its enzymatic activity by measuring PDE4D message or protein or enzymatic activity in a sample of peripheral blood or cells derived thereof.

34. A method for predicting the effectiveness of a given therapeutic for stroke prevention or treatment in a given individual comprising screening for the presence or absence of the stroke at-risk haplotype in the phosphodiesterase 4D gene.

35. A method for predicting the effectiveness of a given therapeutic for stroke prevention or treatment in a given individual comprising screening for the expression of one or more PDE4D isoforms at the RNA or protein level, or its enzymatic activity by measuring PDE4D message or protein or enzymatic activity in a sample of peripheral blood or cells derived thereof.

36. A method of diagnosing a reduced or protective susceptibility to a stroke in an individual, comprising screening for a protective haplotype in the phosphodiesterase, 4D gene that is more frequently present in an individual compared to an individual susceptible to stroke, wherein the protective haplotype decreases the risk of stroke significantly

37. A method of claim 36 wherein the protective haplotype is characterized by the A allele at position 142780, relative to SEQ ID NO: 1 and allele-8 for microsatellitemarker AC0088181-1.

The application's sequence listing, which the Patent Office published only in electronic form, follows.

SEQUENCE LISTING (622 sequences)

SEQ ID NO: 1 - DNA, 1691140 bp, Homo sapiens
  misc_feature 1-1691140: n = A,T,C or G
cattttttgaaagaacatctgaaagacaaaatggggaatggcgagtctgtctaataaaccattttgagaaaactggatattcatataaagaagtataaagaggactgttatgttgcacaatacacaaaaatcaactcaaaataaattaatgacctaaacttaatatcagaaatgatgaaacttttaaaagaaaacatagggtgaatgtatgtttagggaaactcaaatttatgttcacaggttgcaaaaagaaaaatatgagaaaaacatagaggaaaatgattctgccaataaagtgagttggaaataatttttctgttttcacaaaaatcattgctaacaaaagcaaaaacaagtgtgggactatagaaaactgatgagcttctgcataggaaagaaaagaatgaaccaatacagaaggcatccagtagattgggacaaaattatgggggattatatatctgaaagggttgttatctaacatgtataagaaattaccactactaagtaggaaaaacaacaacacaaaacaacaaataaccagatggaaattgggcaaagaacctgaatagatgtttctgaatagaagacatgaatttgactaccaggtaaaagaaaaggttctcaacatacctaatcatcaagaaaatgtacattaaaactcactgagatatcttctccactctaattggaattaatgttacaaaaaagaaacaaattttttacaatgaaatgatcagtgtggagttggatgaaggggtactattacactactacacagtgtagggtggaatttaagtcagtatacacactatgaaaaatagttggagtttgctcaaaaaataaaatacaactatcatttgctgtagtaatcccaccactgaatatacattttaagaaaatgaaatcagtatattgaagagatacgtgaaatcctacatttcttgacacattattcacagcactcaagatgtggaatcaacctacctgtccaggaacagatgaagagataaagaaaatgcagtgtgtatacacagtggaatgctcttcaccataaaaaattcacggaatcatgtcattgcagcaacatggtggacaatgtaagaaaagctccccggagaagctgtacagaagctgcctcctcagcagtcagggccagggaccggagctgtttttaccccaggacagggccggccccaagtcatcccagagctgccatggcaccccctcagtcgggtcctgaggaatcctacacaagctacttatatcagtgatcactaggataatccatagaacttttgggaaagaagtttaagacctttctcccaccatttcagcaggataaattccaactggattagaaaatgaaatgttaataatgcaaataagtacatatttatatctgtatataaaatacagttgatatttgcctggtgtttaggtgtctaaaggactttctaagcataaaagcaaaaaaaagtcataaaaatgctatagcagtttgagactctatgcaggaaagggcatcatcacgtgcatggatgaatctgtatctaattttaaacaatttccaatggtgcctgtttccttttctttgaaaatctctggagaaatagttcctcttgctgtgtctttctttaggcaagaatttttactaattgatgtgtagtctgaatcctggctaagtataaaccttttattttttatacctgttcttagtgaaaatgaaactgtgactttttttttaattccttttgttggtcaaaaactacaattaactcttctgagtttcttctctggctgaacaaacaatggtcccattggcctttcagggaactccaggccgtctcaaaaaccttcatgtttcatttcttttcagagctcccaaaaagaatagcttgctcttgacgttgtacatgttagtggaatgatcaggactactttgcaaagatgaaaaatttgtgtttctagtgatttgaaaatagaaatctgatgtaactattagatattgggaaagaaggtgacgaaggtaggtatcaccgaaagcacttaacaattctgaataattctgtacttgattgcatttatgtgtatcataggaacagttgggtttccttgagtgttaaattatttattcacttattccacttcaagccagctaaatgattgtttccctgatggcaaaagtctcagattgattgcacagtttatttggttggattgtttatgctctttttattatttattcttatttcaccaatgaaaatatcactaagttctttggtttgttgacctgattgtacctactttgacaaatcactgcctttctggacccagttttctcattaagtggcagtgataacctgtcatacttacagatataaaaacatgaaagttaaagtattgggtaatactttcctcctatcttttttttattttgaaaaagataaaaaattggcataatgtattagttaagatggaataatcatatgttgatatccagccatttcttctctcaaatgataggaagatttttatgtgaaactacttgtgagagatcttaacaatttgtagttagagaaagcactattatatcatttggaaatgcaagaaacaagttacctttggggcaacagaggcccttgtcattttctcaaaagaaggaagcatcagcattttgatgatgatgttgagattgtagaaatgatgaaggtgaaaaagttattctagcttatgtttagcaaaatgaaatgaacccaaataataaaacagttacaacattgaatctctttgggagaaaaaaaaaagatagaatgctaatgtccttcagaacttcttaaaccagaaccttaaaaaaaagagaagcttttaaaaaatcataatagtttatgatcttgaagggtttaaaagtatttgatgaagatgtcttttgaatttatttgtaggtcttcttgtgtatttaaaagctaagttatcttgtaatcatttttttctatacctttgtcagtaacctcttagtgatgaaataaaaaagattaggtaatcatccagcaatggggaagaagttaaggaacaaagagctcagattaaactagtttttagaatctaagcatttctgcatgaatttgaatcatggaaaacaaaatgtagcactccaacatttgatgcaaaactaaaagtggaatactgctttgatatttgaatgaattgaaaaataattaacatccttggaactgtatgtaaagaaggacttcacaagtattatagatacccccaacctcagcccttttcccatgtatctctttgatcacatccctacctcatagatcacccatgtgctgaagactttcagttctgtatcttcattctagatctcctgaactcaagatcagaatatctttctgacttctgactgtgtatttctggatgttatacaagaacctcagctcaaactcagtattccctaaaccattgtttttgaaactttatgttggatgtgaaatctgtattgtagaataacattaaaaaaagaaagaatagtatgcaaaatatcagagtgcattgtatgtagcaagagtaggtattttcgtaaactttttgttttaattaaacacatatatatttattattgcagtgtaaaatgtatttcttaatttggataagtgttagtgaggatgtggataaattggaactcttgtacattactggtgggactataaaatggcactgccgtttggtaaaacagtttggcagttcctcaaaaagttaaacatacagttaacatgtgatatagaaatttcacttttagatgtacacccaaaagaattgagaacatatgttcacacagcaacttgtacacaaatgttcatagcagcattactcagaagagccaaaaagtggaaacaactgaaatgtccatcaagtgatgaagcagtaaaatgtagtatatccgtacaatgaaatattcagccataaaaaggaatgcaatgttgttgcatgctacaacaacttggatgaatcttggaaacattattctaagtaaaagattccatttttatgaaatgtccagaataggcaaatctatagagacaaagataagtggtttccaggggttgtggggaggagagaatgggaaggtgacaaaatgttctggattagataatagggatgggtataacttagtgactatacaaaaaaaatcactagaatcatatactttaaaaaagatattcccataaaaaaaagaacaagcaagaaaaaataactaaatttgactttaggagttaaaaagaatatagtatctcaaatgaaaattttgctggataggattaggggtagattagacactccagaagttaaagatcagtgagcttgaatacacacaatagaagctagtctaaacaaagcacagagagaaaaaagaacaaaacaaacctcccacaacaaaacaaaacaaaagccaaccaaaaatacagcctcaatgacctatgggaaatatttagcagtctaatatacatgtaattggaatccctgaaggaggaggggggtagaatgtatctttttttgtcccctatgactgctgttaagattttattattgatttttaggaattgcattatatcttggtgtggttgtttaaacagaggtatagcttatcaaccaatggtggagctaaaatagaatacttgaaagtacttatggatgcacagaatctaagatggcccccaattttcctgctaccttgtacccttgagtatatgtgggacctgttacttgcttctaaccaataaaatctcacaccagttagaatggtgattattaaaaagtcaggaaacaacggatgctggagaggatgtggaaaaataggaacgcttttacactgttggtggaagtgtaaattagctcagccattgtggaagacagtggcaattcctcaaggatctagaactagaaataccatttgacccagccatcccgttactgggtatataaccagaggattataaatcattctactataaagacacatgcacacgtatgtttattgcggcactgttcacaatagcaaagactcggaaccaacccaaatgtccatcagtgatagactggatgaagacaatgtagcacatatacaccagggaatactatgcagctataaaaaatgacgagttcatgtcctttgcagggacatggatgaagctggaaaccatcattctcagcaaactatcacaagaacagaaaaccaaacaccacatcttctcactcataagtggcagttgaacaatgagaacacatggacacaaggcagggaacatcacacaccggggcctgtgtggggggtcgggggcagggggagggatagcattaggagaaatacctaatgtagttgacattactttggtttgacattactttggtttgtgggtgccacaaaccaccatggcacatgtatacctgtgttacaaacctgcacgttctgtacatgtaccccagaacttaaagtataataataataaaataacatgtatgtcaagggtgacatgtaattaagcaaagctcagtaaatttaaaatgattgaaattgtactaagttttctgaccacgctagaattaagctagaactccaggtccagatggcttactgatcaattttacccaacactttggaatgaataatgacatttgtatgaaagtcctttcagaaaatagaagatgagggaatatttcctgaaccattttatgaggccagtattgacatgggtaataaaaccaacaaatacattacacaaaaaaattgtagcacatgatatccctgataaaaccaaatgcaaaaatacattaaatttgcaaattgaatgcagcagtagataaaaaggacaataatacatcatggccaagtagggtttatcccagcaaggtaagactggtttaacatctaaaatcaatcagtataattcatcatatcgataggatgaaggaaaaaaactcatgtgaccatctcaacgattgcagaaaatgtatgtgacaatattcaacacccattaatgataaaaatgttaaatacattacaatagaagaaaacttcctcagccttatcaagggtacctgtgagaaaattatggataacatttttcttaatggtggtagactgaatgctttcccctatggtcagaaaaagacaaaactcatcactgctatacaacatttcatgagaggtcagcagtgctttcatgccttaaaggcatgaaaatgaaataagtgatttaagattggaaagaagaactaaaactacgtttgctgatatcaaaaatcccaagaaatctgcccccaaaaagcacttatgaattaataattaaacttaacaaggaagcaggatataagaccactgtataaaaatcaattggaaaactaaaacaaaaccccaaaaaacccaacctaataatctgtttccaataacaccaaaaaacatggaatactcagggatgaattataagtagggataaacaaggtgtgtgcaagacctgacaatgaaaactattaaatgttgttgagaggaactaaggatgacttaaataactggagagacatactatgttcatggactgaaagatatgcaatattgataagatgtcaattcttccaaaattgatacatggattatttagcttggtaaaaatccaagcttttttttgtagagttttcaagcattttgtaaaatttatttggaaatacaaataatctgaatagccaaaacaatgtggagaaaaggagaaaaaattagagaacttacattacctgtttttaagacttactataaaatcttactttcaggtgtggtattggtatcttactgtaaagtcttcctgtaaagtatattgatatttagtgtggtgttggcataaggatagatatttaggcctatggaatagaatagagggtccaatagtagattcatgtatctgtagtcaagtgattttcagcaaagaagccaagggaagggatcatcttttcagggtagtgttggaacaactggatatctattatggaaaaagtgaacctttatactgtatactgtatgcactcaaattttactttggactggatcacagattcaaatataatagagatatctaaaaaccttccaaaagaaagtataggagaaaaattcttgcaattttgcatagacaaagatatcttagttcctagaaaacataaccataaaataaaaattacatcaaatagacttcatcaaaattggaaatttctactctttgaaatatactgttaagaaaatgaaaagacaagaaaattcccattacatagctcacaaaatacttataactaggatatgtagagaacacttcaatactaagacaatgcaataaaaaaacaaaaaaactggacacaacaagaatatatatgaaatactcataagcacatgaaaagattattaacatcattaatcatacaggaaatgcagattaaaaccacaacgagatactaccatgtacacactaaaatggctaaagccaaagacactgacataaatttttggtgagtgtggggctcctggagccctcagacattgctgataggactgtgaaatgacacagccactttggaaaatgagttcatcatttctaactaagttaaacatacacataccttaatttcattcctaggtatttatctaagggataagaacacatgtgttcacacaaattgtgtggtgttcatagcagctttattcataatatcaaaacattggaaacaatctacatgtctatcagcaagtgaatggaaaaatattttgtagtatatccatgcaatgaaatattacccagcaataaaaataaactatgggtacatacaacaatataaatgaatctcaaaaatatgccgagtgataaaagccattctggttccatttacatgaaattctaggaaaggggaatctatggaggcagaaagcaggtcagaggttgctttggtctaggggatcgagaggccttactgccaaacagcaccagtagattctttgggggggcggaagagttttatattttcattgttgtgctgtttacatggggatatgcatttgtcaaaactcactgagctctacatttaaaatgggtacatttttgtagtattttaattataaatcaaaattgaacaaaaaagtaacacatgttatttgaggacttttttttttaaagcatcatgttttatttttattttttgcagacaagggttttatttaatataactcataaattacattgccaatatcctaaaggtaataaagaagtcaaaagcactatttgtgaaaatcagtatatcatatgacggtaagcatagttgctattcaccaaaaacgttcagaaaacatttgaattcattgtctgaaagagcttaggctcaagacttgaattactaagaaaagaaagtagtatataattatacaaagatgagtaataaccaaaaactgttctttaatgcatgtttgtttttcctgaaagccatttctttctttttttcttttaatactttaagttctagggtatactttaagttctagggtacatgtgcacaacatgcagatttgttacatatgtatacatgagccatgttggtgtgctgcacccattaagtcgacatttacattaggtgtgtctcctaatgctatccctccccactccccctaccccaggacaggccccggtgtgttatattcccctttctgtgttcaagtgttctcattgttcaatgagtgagaatatgaggtgtttggttttttgtccctgcgatagtttgctgagaataatggtttccagcttcatccatgtccctacaaaggacatgaactcatccttttttatggctgcatagtattccatggtgtatgtgtgccacattttatttttatttttattatttttatttttaaaattttattattatactttaagttagtgtacatgtgcacaacatgcaggtttgttacatatgtatatatgtgccatgttggtgtgctgcacccattaactcgtcatttaacattagatatatctcctaatgctatccctccccctaccccgaccccacaacagtccccggtgtgtgatgttccccttcctgtgtcaatgtgttctcattgttcaattcccacctatgagtggcaacatgtggtgtttggttttttgtccttgagatagtttgctgagaatgatggtttccagtttcatccatgtccctacaaagcacatgaactcattatttttcatggctgcatagtattccgtggtgtatagtgccacattttcttaatccagtctatcactgatggacatttgggttggttccaagtctttgctattgtgaatagtgcctcaataaacatacgtgtgcatgtgtctttatagcagcatgatttataatcctttgtgtatatacccagtaatgggatggctgggtcaaatggtatttctagttctagatccttgaggaatcgccacactgtcttccacaatggttgaaccagtttacagtcccaccaacagtgtaaaagcattcctatttctccacatcctctccagcacctgttgtttcctgactttttaatgatcgccattctaactggtgtgagatggtatctcattgtggttttgatttgcatttctctgatggccagtgatggtgagcattttttcatgtgtcttttggctgcataaatgtcttcttttgagaagtgtctgttcatatccttcgcctacttgttgatggggttgtttgtttttttcttgtaaatttgttcgagttcattgtagattctggatattagccctttgtcagatgaatagattgtgaaaattttctcccatcctgtaggttgcttgttcactctgatggtagtttcttttgctgtgcagaagctctttagtttaattagatcctgtttgtcaattttggcttttgttgccttgcttttggtgttttagacatgaagtccttgcccatgcctatgtcctgaatggtattgcctaggttttcttctagggtttttatggttttaggtctagcatttaagtctttaatccatcttgaattaatttttgtataaggtgtaaggaagggatctagtttcagctttctacatatggctagccagttttcccagcaccatttattaaatagggaatcatttccccatttcttgtttttgtcaggtttgtcaaagatcaggtagttgtagatatgtggcattatttctgagggctctgttctgttccattggtctatatctctgttttggtaccagtaccatgctgttttggtgactgtagccttgtagtatagtttgaagtcaggtaccgtgatgcctccagctttgttcttttggcttaggattgatttggtaatgcgggctcttgtttggttccatatgaactttaaagtagttttttccaattctgtaaagaaagtcattggtagcttgatggggatggcattgaatctataaattaccttgggcagtatggccattttcacaatattgattcttcctacccatgagcatggaatgttcctccatttgtttgtatcctcttttatttccttgagcagtggtttgtagttctccttgaagaggtccttcacatcccttgtaagttggattcctaggtattttattctgtttgaagcaactgtgaatgggagttcactcgtgatttggctctctgtttgtctgttattggtgtataagaatgcttgtgatttttgcacattgattttgtatcctgagactttgctgaagttgcttatgagcttaaggagattttgggctgagacgatggggttttctagatatacaatcatgtcatctgcaaacagggacaatttgacttcctcttttcctaatcgaataccctttatttccttctccttcctgattgccttggcaagaacttccaacactatgttgaataggagtggtgagagaggacatccctgtcttgtgccagttttcaaagggaatgcttccagtttttgcccattcagtatgatattggctgtgggtttgtcataaatagctcttattatttggagatacatcccatgaatacctaatttattgagagtttttagcatgaagggctgttgaaatttgtcaaaggccttttctgcatgtattgagataatcatgtggtttttgtctttggttctgtttatatgctggattacgtttattgattttcatatgttgaaccagccttgcatcccagggatgaagcccacttgattatggtggatcagctttttgatgtgctgctggattcggtttgccagtactttattgaggatttgttcattgatgtacatcagggatattagtgtaaaattctctttttttgttgtgtctctgccaggctttggtatcaggatgatgctggcctcatcaaatgagttagggaggattccctctttttctattgattggaatagtttcagaaggaatggtaccagctcctccttgtacctgtggtagaatttggctgtgaatccgtctggtcctggacttttattggttggtaagctattaattattgcctcaatttcagagcctgttattggtctattcagagattcaacttcttcctggtttagttttgggagagtgtatgtatcgaggaatttatccatttcttccagattttctagttcattttcatagaggtgtttatagtattctctgatggtagtttgtatttctgtgggataggtggtgatatcccctttatcattttttattgcatctatttgattcttctctcttttcttctttattagtcttgctagcagtctatcaattttgttgatcttttcaagaaaccagctcctggattcattgattttttgaagggttttttgtgtctctatttccttcagttctgctctgatcttagttatttcttgccttctgttggcttttgaatgtgtttgctcttgcttctctagttcttttaattgtgatgttagggtgtcaattttagatctttcctgctttctcttgtggacattcagtgcaataaatttcccactacaaactactttgaatgtgtcccagagattctggtatgttttgtctttgttctcattggtttcaaagaatatctttatttctgccttcattttgttatgtacccagtagtcatttaggagcaggttgttcaatttccatgtagtcgagcggttttgagtgagtttcttaatcctgagttctagtttgattgcactgtggtctaagagacagtttgtcataatttctgttcttttacatttgctgaggagtgctttacttccaactatgtggtcagttttggaataggagtggtgtggtgctgagaagaatgtatattctgttgctttggggtggagagttctgtagatgtctattaggtccacttggtgcagagctgagttcagttcctggatatccttgttaactttctgtcatgtggatctgtctaatgttgacagtggggtgttgaagtctcccattattattgtgtgggagtctacgtctcttagtaggtctctaaggacttgctttatgaatctggctgctcctgtattgggtgcatatatatttaggatagttagctcttcttgttgaattgatccctttatcattatgtaatggccttctttgtctcttttgacctttgttggtttaaagtctgttttatcagagactaggattgcaacccctgccttattttgttttccatttgcttcgcagatcttcctccatccctttaatttgagcctatgtgtgtctctgcatgtgagatgggtttcctgaatacagcacactgatgagtcttgactctttatccaatttgccagtttgggtcttttaattggagcatttagcccatttacatttaaggttaatattgttacgtgtgaatttgatcctgtcattatgatgttagctggttaatttgcctgttagttgatgcagtttcttcctagcctcgatggtctttacaatttggcatgattttgcagtggctggtaccgtatgttcctttccatgtttagtgcttccttcaggagctcttttagggcaggcctggtggtgacaaaatctctcagcatttgcttgtctgtaaaggattttatttctccttcacttatgaagcttagtttggctggatatgaaattctgggttgaaaattctttccttcaggaatgttgaatattggtccccactctcttccggcttgtagggtttctgccgagagatcagctgttagtctaatgggcttccctttgtgggtaacctgacctttctctctggctgcccttaacattttttccttcatttcaactttggtgaatctgacaattatgtgtcttggagttgctcttcttgaggagtatctttgtggcgttctctgtatttcctgaatttgaatgttggcctgccttgctagattggagaagttctcctggataatatcctgaagagttttttccaacttggttccattctccccgtcactttcaggtacaccaatcagatatagatttggtcttttcacatagtcccatatttcttggaggctttgttcgtttctttttattcttttttctgtaaacttctcgcttcatttcattcatttgatcttccatcactgatacccttccttccatttgatcgaatcagcaactgaggcttgtgcattcatcatgtagttcttgtgctgtggttttcagcttcatctggtcctttaaggacttctctgcattggttattctagttagccgttcgtctgattttttttcaaggtttttaacttctttgccatgggttcgaacttcctcctttacctcagagtagtttgatcatctgaagccttctgctctcaactcgtcaaagtcattctccatccagctttgttctgttgctgctgaggagctgcgttcctttggaggaggagaggtgctctgatttttagagtttccagtttttctgctctgtttttcccccatctttgtggttttatttacctttggtctttgatgatggtgacgtacagatggggttttggtgtggatgtcctttctgtttgttagttttccttctaacagttaggaccctcagctgcaggtctgttggtgtttgctggaggtccactccagaccctgtttgcctgggtatcagcagcagaggctgcagaacagcagatattggtgaacagcaaatgttgctgcctgatcgttcctttggaagttttttctcagaggagtacccggccatgtgaggtgtcattcagcccctactgcggggtgcctcccagttaagctactcgggagtcagggacccacttgaggaggcagtctgtccattctcagatctcaagctgcatgctgggagaaccactactctcttcaaggctgtcagacagtgacatttaagtctgcagaggttattgctcccttttgtttggctatgccctgcccccagaggtggagtctacagaggcaggcaggcctccttgagctgcagtgggctccacccagttcaagcttcccggctgctttacctactcaagcctgggcaatggcgggcgcccctcccccagcctggctgccaccttgcagtttgatctcagactgctgtgctagcaatgagcaaggctccgtgggcataggaccctccgagccaggcacgggatataatctcctggtgtgccatttgctaagactgttggaaaagtgcagtattagggtgagagtgacccgattttccaggtgccgtctgtcacccctttctttgactaggaaagggaattccctgaccccttgtgcttcccaggtgaggcgatgcgtcaccattctttggctcacgcttggtgtgctgcacccactgtcctgcacccactgtccgacactccccagtgagatgaacccgttatgtcagttggaaatgcagaaatcacccgtcttctgcgttgctcacgctgggcactgtagactggagctgttcctatttggccatcttggttccatcccccctacttttgagattttaaacttgggatgcctttgattcattttattcaagtattaatttgagtaaaaagtcatgtatgtgcatgaagtattagctgcagtggtggttttgttcttcataactttgctcataatagctttgtttatttatttattcatttatttatttttgagacagggtcttgctctgtcacccaggctgtagtgcagtgacatgatcttggctgacagcaacctctgcttcccaggttcaagtgattctcctgtctctgcctcctgagtagctggaattacaggcatgtgccaccatgcctggctatgttttgtatttttagtagagacagggttttgccatgttggccaggctggtctcgaactcctgacctcaggtgatccacccgccttggctgcccaaagtgctgggattacaggcatcagccaccatgcctggcctgctaataataactttaaaaaacctaacatttcatattttgataaataaatgcagtactcatatccagttgaaagggaaatacaacattatttaataaacatattacatctaaatattaaaaaattcctatcatatgataaattaaaaaaaagagaagagattaagcaggggcttagaaacataaacaaatataaacaaactttacaaaactgaatggattagcagggtgttggggcacatgcttgtagttccatctccttggaaggctgaagcagaaggatcccttgaacctagcccaggcaataaagcaagaccctgtctcttaaacaaaacaaaacacaaaacaaaacagagacaattggaggaagacagaaactagaaagaaagtgtaaaaaaataaaaacaccccaaaactcacagaaattaaagtgatttttaaaagttgggttgtttatttgttaactatgagcatgaccgctctacagtcagaaaagataaaatcaaggctcagatggggaaacgcatggtgctgcttttagaaccatgctcagaaagatttggtggagtttaaacaaacaagttcagacttctgttgccctcttttataggagtgaaagagaaaggaaggaaagatttacaaaggtgtaaatccctttcatcccctggaccacagaggtgtagcagagaatggttcctgtaagacttgaaaactgaaagtacaacataggtgcaatttgtgactaagtatcactggtacaaagaacttaactgattgaaatatatcaataagtaatctcttgggtggtcatacaggaatgcttaaaacctcagacccaattaatggcaaaacaatgaccctacatctgttttttatgtatacacacacacacacacacacacacacacacacacacacacacacaaatacatatgtaacaaccttttttcatggactgtcttagttcatctcattttgaggaaatagttgttgaatgacttctgtgtgtttctgtgacattgtattaagtattcaaatacagacttaaaaaagtaacttcctcttatggctattatattttaatattcctgaggcagatcattatcgattacctgtcagtctccttggggtttccatgatatccccttgacacatctctattgttgtcttccacattgctttgtgatggcttctgttcgttcatcttcttctccagactgtgagcttcttgataacaagatctttgtctcactgttttgggattctcagatcttagcacagtcctagaacattttatgctcttttcaaaccttcgttgaatgaatacattaatgattctcaagtatatatttcaagtgttgacctgtcccctaaattccagagctgctatcatcatcttcctgttgaatatttccatgagtctactatctttcacaaacccaaactgcttctcttccgtgacaaatcagcagccccttctggctccactgtttttgaagtaggcccccttaaagctgaagattcacagtttatttgtccatagttgccctatcttagcaccctattttaaaatgtgtttttgttatgcagactttgtaagggtcaaatcatggccttcaaatcgatttagagaaattgaaatctcgcaatgaatatctcatgagaagagaagcataatgaagactacaaaaaagcaatgcatttaaaaagtagcatgttgctcctgtgtgtgtatagcacaagagaagcttagaagagtgacgatatctcccagctgtcacacttttattttatatccttcagttatttgtggcaatgatggaaaccagaacaatatgattgacatccttagagtattcataacactattcttagctcgcatgtgaccttgcattccctcagacctttcaccatttctcttttaaacaaatttttaaattttctaacaatctccagtttacaagaacggctatagcacagtccaaagacctttttttttttttttttctgaaccatttgaaagtaaattgctaatcaaatgttctatcacctataaatacttctgtgtgtttttcctacaaactaggtcacttccctgcaggaccctcagacaagcataaaaatcaggaaagtaacactgattacttactattacttactattcttttttttttttttttttttgagcagatctcaacagtgggcttaaaatcttcactaaaccatgtgttgtcatttctggaacacaggtagaatagatgtagcataattctatttttttttttttttttaggtggagtcttgtgctgttgcccaggctggagtgcagcggcacaatcttggctcattgcaacctccacttcctgggctcaagcaattctcctgcctcagcctcccaaatagctgggacgacaggcacatgccaccatgcctggctaatttttgtatttttagtagagataaggtttcaccatgttggccaggctggacttgagctccagacctcaggtgatccactcacctcagcctcccaaagtgctaggattacaggcataagccactgcacccagccagatgtagcataattcttaagggccctaggatttttggaatggtaaaggagcactggtttcaacttcaagtcaccagctgtattagcccctaacaagagagccaggctgtcctttcaagctttgaagccaaatatcgacttctcccttctagttacaaatgtcctagatggcatcttctcccattaaaggctgtttttgtctacattggaaatctgttgtttaatgtagccactttcattatgatcttagctagattttctagataacttgctgcagcttctacattaacccttgctgcttcaccttgcacttttatgttatgaagacagcctctttcctcaaacctcataaaccagcctctgctagattccaggttttcttctgtagtttccccacctccctcagcctttatagaattgaagagttaggacttttctctaggttagggtggggcttaaagaaatgttgtgattggttggatcttctatctaggccactcaaactttctccctatcagcaacacagctgtttcactgctttatcatttgtgtgctcactggagtggcactttagtctctttcaagaacttttctttgcattcataacttggctgtttggcaccagaggcctagcttgtgacttctctcagcttttgacctgccacccttactaaggtcaatagtttcttttgatttaaggtgacagatgtgtgactcttctttcacttgaacacttagaggccattgtagggttattaattggcccaatttcaatattgttgtgtctgagggaatagagaggcccaaagggagggagagagacaggggaaccacctgttggtggagcagtcagaacacacacattggttgattaagttcacagtcttatgggcatattgtgtggttcccccaaacacttacagtagtaacagcaaagattacttattgatcataggtcataataatagataaaataataattaaaaaattgaaatattctgaattaccaaaatgtgatacagagacatggtgtgagcccatgttgttggaaaaatggtggtgatagccttgattaacacagggttgccacaaaacttcaatttgtaaaaaacataatacctgcaaagcaactaaagtgaagtgcagtaaaacgaggttatacctgtatattaataggtgactccaataaagacttcggtaatctataacaaggagccaactatcaaatggcaactgcaaagatagttctctcactgaagctaacaaaaacatctacaaactttcagctgaaaaatcaaaaaagtttgagttgtataggacattctaacaccagggaatgagacatatctttttgtatgtaataataatgcaagcctgaaagtcttccagtgactcacagagtaataactgtgacagaggctttctgaattacacatggtgaattttacaaaaacataatatgtggatgatgtttacataagtttatatcttcttccatactatgtaatgtggttctacaaatgtttaggtaattagggtttaggagggtataattaaatgatttattattcaataatatgcttgtgttgggacattgtggaattttacctgctattgttgtgaggcccggagccaaatttaatcttatctattagtgcacaatatatttcttaaccagattttaaagaaaatctagccaaagttgtatgtgattcatgttgtatcttcctcctgatgttagttttaatgctttaagatagtagtagctatgattgatgccactgaaacttttagttcacttgactcctctatatagcccatggatacccagtgtagtacattgatttggttttatgactattgacaccattttctgatttatgaaggttgacttgtccacaatcggtgagagctgggatttaatccagatattctggctacaatcccaataagagatgggtcattcttatccttcattcatgtattcattcattcatatcattcattcattcattctttacacagaaatgtgttggtacctatgatgtaccaggtatttttctagccatgggaggcatatcaacaaatgaaaatgataagaacccctaccctgtggagcttacattccagtagggcagaggggaaacaatggcagataacataataagtaaattctgtagtatattaagtggtagtaatgtatacttggaaaaaagtaagcaggtaaatggaattgggcataccaattttatacctctttggagggagatatgaattaatttttcaattttatctcataaattatgtcaaaataataggttttgtcccaagcctttccaagcaggtagcctggaacaagtgttctgctcttctcctctctccccactactcagaacattgctataaaagatagctaaattacaagatcaacttacagagtcctacttaattcattatgtagctcaactgtggttcaaatctagtagtgttatagacctaaccagtccttacagtgggttttctccccagtctggtaaactgtattccatgctccagctgcaggtgacaggaacctcatcctttcatgctgctcttttagctttgggagtaagcaactccctctccttccacattatccaatattgtgcggcagagacttgcttccattaaagatactgatagtggctcctccactgctagaagcaggaggatgatcttggggaatgattatggatttaaaggaggaagagatagtagcataggcttctgttttcacaggaaataggaaggttgacagttggaagaaatcgtagaggagtcccagctgggatcagtgacaggagggaggaaaagggaggccctggtctcacaggaaggttgagttattgggatgtttatgagtcaaggatggtcgcttatcacccagtatgtaggtttctgtagataaattcctgagatgaatttacctatgccttcttgcttgatttcttttttgctttttctttctttctccctttccctttccttttcctttcccagggtattgctcttttgcccaggctggagtgcagtgtgcaattatagctcactgcagactcaaactcataggctcaagtgatcctcttgcctcagtcttctgagtagctaggaccacaagcatgcaccactatgcctatctaattttttaatgtttttgtagggatgggattttgctatgttgtccaggctggtcttaagctcctggcctcaggtgatccttccatcttggcctcccaaaatgctgagattataggtgtaagccaccatgcctagcctcatttaattttcataaagtctgaaattattatctactctaagtttggcaagcaactggttgtttagagtttagtaataattttttgaaaagatataatggatataatttttacatatttgtttaatagcatcctcacaaagaaatttttaaatttcttttatagaattctgattattttacagccctgaggtactcttaattttaaaatatatttcttttttaatacattatttttcataaaggctttataatcagcatgcttttattttttaaaaatattgtactactaatattgttgcataacttcaaaaattatcatttagtagccatataatactggctaataattaacataatataatataataaatataatataatataatatatagtctattgataaataggtatttgagtgtttatctgtttgccttgtattatactaggaaatgtggcttgccaaaataaatgcattatgctttcggttagcttgtagtctcattcataaagcaatgtagatacaatgcagtaaggataaggtgaaatctgcctttgcaaagggatttttaatttggaaaaagaagggatttgtgggacaatgagatagaaggctttacagaaaaactagatggctttgtggagaaagagaatttaactagttattaccagttcaaccgctacatccccattcagaccatcagcatactgtgtgtcttcctttttccctgctttccccttgcaatctatttgctatacaggtgccacagtaaaaagcaattcagatcaagtgactcctctgttcagaacccaccagtggtttctcaggtcatttataatgaacccctcagtctttaatgatatagcctacaaagttctgcatgatctgcccccttggctgcctctctaacctgatttctgacttgtgttttccttacacacactgtctcttgatgctggacgcattcctgtacgtcacacactcccagcatgctctcacattacaatgtttgtaattgccattccctccaccttgaaagtttgtctctgcagtatttccctggcttgctctcatttcctttggatctctgctcacatgttacctccttagagagggccttcctgaaaatgatagaagtgttttttttggagcacatcccctcactccccagctcctctccagtgtatttttctccatagcatctttctgcctgaccttgtatttctatatctttttgctttttatcttctggaaaacaagctccatgagatcacacagggattttgctttattcctcactgcatgtcccctcctaatacagttcctggaatacaggtgggggttcataaatatttgttgggtaaatgaaagaatatattaaaatattatcataaaccttttttctttccatgatttgatgatgtggaattgaaaacaggtctacatagatgatagtgatataatcaacagcattcctgagtacgtctaggatcagcacttggtctagaaaagatctgtcttctgccctcctttcccgtccatgcacatccactgcctttgggatcaaacccaatctccttcctctggcagtcagggccttctgagacctcatctctgttgatctttctagctttacttctaccaagtcattcccctcataactgcatgtcatactgagtggcttatagttcccctcctgtggcccttgcagatatttcttgcattgcttttcatttgtcacttatttgtttatgggtttctcctcacagtgcataagctcttcaaaggaagaggcctggtatatctttgtatttctgggatctagcgcagttcttgtatattgtagatggtcagtaaatacttattcaatgtaaaagatgttttttgccttccaaagactagtggtaacttgaaatggttggatataggacagataaactgatagaagcagttttacctcattagagggcttggatataagtatgtccagggacaaatatagtaaaaaagagagcaatattataatatcctttaaaaaaaaaaaaagagacaggtcttgctgtgttgcccaggctggtgccattatggctcactgtaacctcaaactcctgggctcaaacagttctcctccttcagcttcctgaatagctaggactactggtgtgtgccaccatggcggctaattaaattttttttttttttttttttttttttttttgtagaaatgggttctcactatgttgcccaggctggtctcaaattcctggcctcaagtgatcctcccatctcagcatctcaaagtgctgagattataggcgtgagccactgtgcctggctagaatatcctaacttttagcaaaatcatacctgagatgaggaaggatggcatataacatgattgaatcagcacacttaactaagaaagatagcctaagtggaaagaagggttatttgaaaggcattatttagaaagaaggggagccatttggcagtggactgactatgtgggcatcagtcctttatttagtcactgagagtcatgcaaggtggtgagcctgctgataatgaggaaataatacagaggggagaattcaggggagtgatgacacgttcacgttcttgctattttggacttattaacaacgtgagtgttgagggttatgatagtgttagcctggctgctcctggttcgggaaagagtgctatgaaaattgagatatatctgtctagtgtatgggaggagaaaatggctgtatttggttctatatatttgtcatgcctggttgatggtttgtattttctatagtgatttgtgagtgacaatggatctatattcaattgacccagtatagttgaatatgtgaaaatattttatgtaattttactaatatatattttgttaaaatacaaccatatagaatctactaggctataggtgttgaaagataacatttttttttttctaaatcaggtttgttacagaaggagaaagtggcagttgaagcatttcagatttgctgccttctcctacctcctgaaaataggagaaagttacagctattgatgaggatgatggcaaggatttgcttaaacaaagagatgccacccctgtgtgatggctttggtacccgaacactggtaggttgatttttaacatcaggtatgactttttggaatgaaagtcgactgagtaaggtgtattagtttgggtgatcagagggaagtacaaagcagacttgcttaaaagagccacagtcagtgtccacccagacttgtgtcgtgcttttgttctaagtgtcttaaagaacataatgagaaatggagacttgagtaggggcagactctgtagagagatctgctacatcctgttctcccacttaaaattattttaaatttattcttaattgacaactaataattgcatatgtgatgttttaattcatgtatacattatagagtcaatcaagctaattaacagattcattaccataccaacttatcatttttttgtaatgagatcattaaaaatctattcttttctcaattttgaaatatacaatatattattataattgtcgtcaccgtgctgtgcactagagcattaagacttgatcctcctgtctcactggatctttgtaccctttgaccaacatctatttccatgtccctgtatcccccagcctgtggtacctaccatctaatctctgcttctattggcatatgtttttaaagagagtttattttagaatttacttactagcaaaatctcttgattttcctcaaaaaatgtctttgagcaaaactggtgcttcagtggaatgtatgtgctttccatatcctgttaaaacaccgtgtactccctggggattcactggcccagttttagaagtaatagagtgagatcagaggagcacttagtgcccagtaggattcttgatctctatatttttttggagtgagtggatggttagagaggctaatagacctttttgaaaagctgaagaaaactttatatctattctgcatataaaatacacatgcaaaactttgcatgcagtttcaaggcgatcacagagtccctggggtccatggtctccaggcaaaaaattctctgcctgtgtgtctctctgtacatgtaaatgtaagtgaagatcatttgcagtgtgttaatgaagtgttactaagcagaattacatgattttttgcttaaagattttgaaggaagattgtcagcaataaaagtagtaggaaaaaacaaaacaaaacaaaagccagtccaaagaacagtattaagaatggagtagttaggctgggcgtggtggctcactcctgtaatcccagcactttgggaggccgaggcaggtggatcacctgaggtcaggagttctagaccagcctgaccaacatggtgaaaccccgtctctattaaaattacaaaaattagctgggcatggtggcaggcgcctgtaatcccagctactcgggaggctggggcaggagaattgcttgaacctgggaggtggaggttacagtgagccaagatcacaccattgcactccagcataggttacagagcgagactccgtaaaaaaaaaaaaaaaaaaaaagaatagttaatttcaattctatggaaattattacattgatgctataatatattttgcatttctgcttgcctcaaagagagtctcatcacttaatgtacttcttgaaaagtcccatggctttgttcaaagatgattgtcaaatatacatcgaaaatcctagagaaaataagctaactaggaaaagatgtaatggttgaggcatgtggactgtgttagcggtttaaaacaaatcaataatgaaattaggataaataataattgactaaatggctataaagtgctttgaacttagtagtgctacatgattcaagtcatggtgataatgattttcaaaatttgttttcatatatttatatgtgtgtatgtgtgtgtatatatatatatatatatatatatatatatatgtatatttaaaatcgtgtaaaaggaggtttaaaaattgctcagataagcatctctctgcagtctcttaacaggaagatgcacattttgtttgttctggttgttgagaccgtcaacccatctgagatggctgggtactcttggtagaatatgcaccctgtgccttagaccatttctcatatttgccttttgcaaattagattgcactcagttcagaaaaatactcatctgcgtttaccccccaccccgctctttttttagatggttcagacattttcccgttgcatcttgtgttccaaggatgaagtggacttggatgagttattagctgctagattggtaacgtttctgatggacaattaccaggaaattctgaaagtccctttggccttgcagacctctatagaggagcgtgtggctcatctacgaagagtccaggtaaaggagaggatattatcagttctatgaaattggcaatataaagtcacgtaagcttgctaggcttcttggggcattttattatgaggattaagtgaattaatgtttataaagtacttacaacaggtcttggcacatagtaatcccctgcatgtgtttgtattatcattgaaaagtttacagaatgcacatttggttttgtgtatcaatccatgtggcatattttttattgctaattccttgaatgagtttgtttagaatctacatacacctactgatggaaatgattttatgtgcagtaagtgtcttgattcataattgccctgtgacctagtttaatattcccactttttgcatgaaaaagctaaggcacaaagaacttaaataacttcgcttaaggccacagagccagaattctgactgttgcagtcagcctctgtaatcagtgctctaaactatcattccatattgcctgtctaaaaatcatagtacagtagaagaacactggcatgagagccatgaatccctggccaaattcctagctgtatcctttctgtcgtgtgactctgggcaagtcccttaaccgctttggattttactttctttcctcaggcgttaaaatgggctattctttctttataaagttgtgaagattagaacactgtactttacaattcctaggatgaatttctgacatatgtcaggtattctttgaaaggtagctgctgctgttgtcatggtggttatataaaaacaatgcaaaagaaatataatatattattatcgtgtggaccccaaagtggggtttgtatgtcagcctgtgggagcagaaacctggtaaaggcaggcagaaggtccacttgactccttctgactgattggacctcttctcatttgagatctttttgaggcaccacaatcaaggaccagtgaactgcctccttctgaggtattacaaaaataattaattgtccagctgtttctagaaggcaattttaaaattaaaattttttctatttttttgcaattatcaacctaacacattgaagaaacttgggaaatatagaaaaaacacaccaaaaagtatcagagttacactaaaatgttcatagtcagtaatatagtctttcagatttttttttctgtgtctgtctgctgtctatgtccatgcctaccttactttcttccctctctcttccctccccaccctcccttccttccttccctccttcccgccttccctgcttccttcttgcctgcctcccttcctgcctgcctcccttcctgccacttacattctgttaacaatgagaaaaaaattcccccatcattaaatattgttgattggcatgagaatggccaagagcacagactcaggagcctttgaattcatgacatgccttttgttagctgtgtcaccttaggcaaattatataacatgtctgtgcttcaacatctgtcccaacatttctttttctcatctgtaaaatgggaataatagtagttaatatttacctcatagagtttttctggggaattaaaacatgtgattaaaatacatgtgggcttaatacatgtgaaatgctcacaataatgtttatcacattgtaaacctacaattagtagctgcctttgttgttggtatcatcattattgttatattattccataataatattattggcaacatagtattccataatatggatataccataatttatttaaatgatactttttggttggtatttagattgttttcatgctttcccccattttggaagcaatatagcagtaaatatttttaaaggtagattttttttggctaatctgtgattattttttaagaataaactcctaggggcagcattgcttggccaaaggccatgaacatattttaagtatctatagcatattgccaaatttagaatgatcatttcaatttacatttctgtcagtggtataagagagtgttcatttctttgcccctttgcctactttggatattatcattaacacttgtatatatctttgccacttgcatgggtgaaaagtgtaattttaactgctgttttagtttaattttttcctctgatatttttatgagccaaccctaaagaaaataaaaatgaacagaaatacttcaccaagtttctgcaaggaaatgttatagcagtgtattagtctgctctcatgctgctaataaagacatacccaagactgggtaatttgtaaaggaaagaggtttcattgactcagagttcagcatggctggggaggccccaggaaacttacaatcatggcagaaggggaagcaaacacatccttcatgaggcagcaggagagagaagcaccgagcaaaagggagaaaagcccctcataaaaccatcagatctcatgagaactcactcactatcataagaacagcatggggggaaccaccctgtgattcagttacctcccatctcccacagcaaggggattatgggaactacatttcaagatgagatttgggtgaggacacagccaaacaatatcaagcaataactgtgttgccctgtatacttgctaggtttgtgtattcacatgcatagcacaggcatatattgtagtaacttagccttgtgagccctttgctattacttgaagttcagaaggctgagctatggtgattaatttaactgcaggtaaacatgatcttgttaagagacactgcagtgtgctctgaataaaatcagtagtgattcatttgtccagttaccttttctctcttgcaagtacatattagaattgccaagcacctgttccattcagccctcagaacctatagatctttgttcttttgattaggctcctaagcctctacactgtatcacatttaggggagtgcttctctgaaaatgcagtgttgcttggattattccagtgattgttttaggacagtttcagggctgaccctgggatacattattaggtaggcaatgtttttgacacaagccttctatgatcctcatctgcaaccttctatttcaaaggactccaggctctgaaattaaatatttttaatgtatgttcatttattcacaggccttggtttcctttttcctcttatttctctcttctcccttatcccttctgcaatgtctgcacctttgttgttttacttgattctcatgggtaagatgttaggaaatgattgtagtacccctctcttcctaaaagcttagctaaatgcntgccactaccatccccaaggcattgagaatcacactcttcagatgtgggaatgcgcctggatagttccagtggatatccaacattatcaatgttttgaatcantttagtcaatgtgtttaatttatgcttgaatttcagatcttgttaaaagagggaatgccgagaccagctcggtcgtggagaccctaacccagtggccctagaggaattaaagacacacacacacacacacacaaatatagaatgtggagtgggaaatcaggggtcttacagccttcagagctgagagctttgaacagagatttacccacatatttattgacagcaagccagtcataagatttactaaaagtattccttatgggaaataaaggggtgggtgaaataaagggaagagctctggctagttatctgcagcatgaacatgtctttaaggcacagatcgctcatgctatngtttgtggtttaagaatgccttaagcggttttccgccctgggtgggccaggtgttccttgccctcattcctgtaaacggacaaccttccagcatgggcatcaaggccatcacgagcatgtcacagtgctgcagagatttngtttatggccagttttggggcctgttcccaacgagggcacaagctttttttgttattgaaatggctcttgggtttacaaaggtaaaaatccaatttaaaaccgtggctttaaataataatattttgaagttatggaaatacttttacttttcaatatagagtttcccccaatcaaattttgaggactaacatggcattgctacggtacaaggagatatcctgtatttgatctaaactaattcttataatttatttgaaaatatgctatattctttcactactaatccttttgcctcagataaaatacccaggagctgatatggatatcactttatctgctccatcattttgccgtcaaattagtccagaggaatttgaatatcaaagatcatatggctctcaggaacctctggcagccttgttggaggaagtcataacagatgccaaactctccaacaaagagaaaaagaagaaactgaagcaggtaaaaggatattctttataagccattttttctcctccctactgtttttatgtttttttttttattttaataggcttcatgtaaatctcatcttctgagccatagcagttttctaagtatattagttcatacattctagaagtctcactgatttacacacttgtggtcagtatcctagatctttattcttcagtgtaaatctgttaccattgccaaactcttcatttttggagctattctctaatatttgtcctttgttttggtatgtggcatgatgtgaattagcagagcatctgctttaatctcagagaagctatcagtgagggtggatttcttttcatgttttcaaaaggcaaatcagatggaattcacaggtgtaaaatgtttagagtttaaaagccgttggttttagatagccactatcaaattagtttcttgcctcaggtatcagtacaagtttttagttcctcttatgttaggggaacacagcttagggttccagcgaatcgtttttaactcacaatatgttacttttgactattcataaaggttgatccatgatcaggtgagtggtttttgtttttaaagactgaactctacatagttggattcagggaacaccgtacatgtgggattacacacagagcaccagagttctgggcttctgatcatattattctcagagtaattttggaggagagtttagtggtaaagatcaacagaaagtatactgcctctcttttaagcttttcacaaagtaatatacaccagaatattccctcttccatttgagcagaagctggtggggctgagttggagaaacagagaaatgatgaaatgtaattgggccaaaattttatttaactgtgtagaacagaagttattttgaagtcagagttacttgtgaatatataaaaagtgaggtctatttatagttggcagtggggggaattttcagaaacatgattaaaaggggaacttatttgaagcttagatcaaaggaaagatggattagctctatagaaattggaatgaaatgttttaacaaaaataaacaaaaacaggaaaatacaggctcagaaactcttaaaatttggctgccaaattttattggcttttatgtgtctttttttactcttcttggaccattcatttttttagtttcagaaatcctatcctgaagtctatcaagaacgatttcctacaccagaaagtgcagcacttctgtttcctgaaaaacccaaaccgaaaccacagctgctaatgtgggcactaaagaagcctttccaaccatttcaaagaactagaagttttcgaatgtaataatacttccacagcaacaggtgctagagaccactgttgttgttttgagtgaatggtggttaggagaaagactttggtggtggaagaaagaaaagcataaaacaaagactactgaaatatagataaagattgccttagtttttaaaaatgtttggccattagtatttttataaaactcaatgctagttttaaagtgtataaattggttaaaatttatgagtcaaatatatagtgataatgttaacatgtttgtaattgctacagaatttaagggtatttttatctctgtgctttctttttcatggtgtttattaaataattgtgtatatacatcctagctactgatatctttattatagccttaagacttaattttaagtcttaaaaatagcgtgtatacttgaataagaaagacactgggtactgttactgtgatgctattgacttagtagccaattatcatttctcctgtataaattccagtttttattgctgcacataaattttttaatgtcttatattgtgatagctatgtcttttattgcagatttattggatgttatgacagattttactaaagctagtgtttttataacatatatattagttgatgtttacctataagtggagtagattttcatctgcctgcaatggtataatttcagtcttagctaaaaatggaaagttgaactggataaattctttgggtacccttagacctctgattctaagtcaaatgcaaatgggttaaataaaatgagactacttcctttataaatatattttcatccttttgaaagtaagtgaaatgtaaataaacttattttttttaaaaatgccatacctcgtgtttcttttttggcatttatttagatcagttagagagcatcctcaaatgcctttgccaatggtcttcatcagtcatttatttctatgagaaaatgaaaagtaagatttgggcttttgtactgactggtctttaggtgagcactttgccaattttttagcattgctttgtccttttgtaaaattgtggtgcacttggattatggagcatctgaaagtcttcctctgagcgcaattacccagaaagctgagagcaacacccactaattggcttacagtactccttggactgatttttccttgcacttaagatttgctcctgttctcttgtagcaaaatacctcctacatctgatgcagattttgcttttaaaaatggaccaaagtattcctattggtttgggtaccaccttacattccaaatacataatgtaatgggagatttttagtgtttcaggattcattctcagactttggcattctgtttagagccaagaataattcttctttctgctctattttcactccgaggtagagtttatttttcagaatctcttttcctgttgcttgtctttggaagtatatgtggttgttttctttccttttttttttaagattacttttttaaaaaaatataacatatttatggagagatcataaaacataagcaccaattaagtgtgaaattgatgaatagataatagcagttatccaaagtggttgtcccaattaacgctcccattaacagtgtatgagaactccttttgtttaatatcctcaccgaaacttgctatcgtcagagtttgaaatgttgtcaatgtggtggttattaatagtgtctgattatggttttattttgcatttccatgattattaatatggctgaacatttttttccatttttttgactttttcgtctttgtacaaattttggtatcagattgtcaagcctncatacacacacacacacatgcagagacacacactcaccctgttgagtttttttttttaattttgattgtattatatgtataaatcaatttgcagagaattgctgtctacaatattaggtcttctagtccatgaccatggtttacctttccattttatttgaaataaatgagaaaaaaagttgcttttttctgtgaagatttacaaatctttngttagatttgttcccaagtatttgatactttaaaaaaagtatcaaaattttcaaagactgtagtacccatttcctgtttcaacagttactcagctgatcaatgttgacgtttaattcttttgtaaatgctggtgttgtaaatttccttatagtgtttgttgcttctgtatggtataaaactgatttttcctgagttttgtttacagtgaaccttgctagacttgttaattctaaacatttagtatgattctttggcattgtctacntattaggaaaaaaacagcttttgcttttccgttccatggtagacagcatctatattgtcctcagtgatccttgcctcctggtatttaatgccttgtgtaatttcctgtccttgagtgtgggtggagctaaaatgacacatttctaaataatagaatatatcatcagtgatggggtatcacttctcagattagattccaaaactctggcttccatcttgcttgtcttccttcttattctctccctggcttgctctgaggaaagccagctgtcatgttgtgagctgccctttcagaggcccaccaggcaaggaactgatgtctctggccaacagccagcgtggacatgaagcctgccaacagctttacgagtgatcttggaagtggatcttcccttggtcaaaccttgaggtgactctaccctagctgacaccttgattggagacttttgagaaactctaagccagaggacttagcaaagctgtgcctggattccttattcacagaaactgtgatataataaatgtttattgttttaacccacttagttgaagaataacttgttataaagtgacctagatacaatatactttccaatctccatacccttccctcccttcccttccgtcccttccctcccttctctcccttcccttcccttcctttcctcccttccctcccttccctcccttcactttccttcttttctttcctttccttcctttccttccttcctttccctggctccctccatcctttccttcttttttgtctcaggacactggagatcttcagtacagcagttccctggttcccatttatctgctgtttcactttgtacagtttcagtaagccacgctcaaccacagtcagaaaatattaaatggaaatattccagaaataaacaagttttaaatngtgtgctgttcttatagcatgatgaaatcttggactgtcctgctttgtccactctgaaaatgacttatccctttgtttcatggatccatgcctggtagaccaggtacattgtnaatgagcagtaatattttgaaaggaatctttttttttttttttttttttttgagcagcagatctcaatagtgggcttaaaatattgagtaaactatgctgtaaacagatgtactgttatccaggctttgcagagcacaggcagagtagatatagtgtattttttaagggcccaaggattttttgaatgatagatgagcattagcttcagcttcaggtcaccagctgctaacaggagagtcagcttgtcctttgaagttttgaagccaggcattggcttctttatagctatgaaagtcctagatgacatcttctgccaatagaacgctgttttatctacagtgaaaagctattgtttagtgcaaccaccttcatcattgatcttagctagattttctggataacttgctgcagcttctccagcctttgttgcttcaccttgcacttttcagttaatggagatggcttctttccttaaacctcatgaaccaggctttgcttgctttcaacttttcttctgcagtttcctcacctctctcagtctttatagaattgaggagttagggccttgctctatagtaggctttggcttaagggaatattgtcgctggttttatcttctgtcctgaccactcaaatgttctccatttcagcaataaggctgcttagcttttgtatcgtgtgtgtttactggagtggtgcttttaatttccttcaagaactattcctttccactcacaacttgactaactgtttggcacaagagacctaaactttccttctatcttggctttcaacatacctttctcattaagctcaatcatttatagctttcgatttaaagtgagaggcgtgcaactctgtttcacctgaacagaggccattgtagggttattaattggcctgacttcaatattgttgtgtctctgggaatagtgaagcccaaggagagggagagtgatgggggaatggctggtgggtagagcagtcagaacacacaacatttatngattaagttctcagccttatatgggcatggattgtgacaccaacaaacaattacaatagtaacatcaagttcactgatcacagatcaccgtaacagatgtaataataatgaaaaacctttgagtattgtgagaattaccaaaatgtgactcaaagacatgaagtgagcacattactgttggaaaaatggcaccaagagactttctcaatgcagggttgccacaaaccttcaatttgtaaaatatgcagtgatctggatacaatatacaatataatctgtgaagtgcaatgaaaccagatatgcctgtgtatatagtgttcaatactatatggtttcagggccaggcatggtggctcatgcctgtaatcctaacactttgggaggccaaggcaggcagactgcttgaagccaggagtttgagaccagcctggccaacctggtgaaattctgtcactactaaaaatttaaaaattagccaggtgtggtggcgggcgcttctagtcccagctactctggaggctgaggcacgagaatcacttgaacctgggaggcagaggttgcagtgagcccagatcacaccactgcactccagcctgggtgacagagtgagaccctgtatcaacaaaacaaaacaaaactatatggtttcaggcacctatggaggtctgacatatccctagcagataagggggagttactgtttaatgtggaatagagtggggatcgcagcagcatcatcttgctcctaatttcaaagaggaggtttttagcattagagtatttgtagatacccttttataattttaaaagaagttattttctatttctattctattgtcaaaaaatttttattgctcgttttaaccataagttgatgttgaatcttaatcaactacctttcctacatttgaggattttataagttctatcttttagtctatcattggggttatattacattaattgattactaatattaagccactttgcattctaggagtggcataaatctaattatgatgtattatcatttgaatatatatatctagattctgttgctaatatttagtttatagttcttgtatctatgttcatgagtaaaattggcctgaaaatttccttctcttactatctttgttgactttctgatcaaggttataaattaagctgaaaattactctctttttctatatatggttggaattatttctttcttgaatcttgggtgaaacttagttaacttttaaaaaataaataatgtaattacaccgaagtcagaaaaatggtttgtataatttcaagtctttgaaatttgttgagacttgttgcatagcctagtatatggtcaatttttgttaatattctgtacacatgaaaagaatatgaattttgcattgattacagtttttttctctctctataaaatcttgtttaaatttcctacaattttactgatttattttgcctgcatatatatgtgtgtgtgtgtgtgtgtgtgtgtgtgtgtgtgtgtgtgtgtgtgtatgtttttttcccccttttctttttagagacagggtttcactctgttgcctaagctggagtgcagtggtgcagtcatagctcacagcagccttggcctcctgggctcaagtgatgctcctgtctcagcctcccaagtagctaggactaattatgctcagctaattttattcaaattttttagagattttgtcttgctgtgcttgttacccagactggtcccaaactcctagtcctaagtgatcttcccaccttggctgcatttatatttattattgagagaattattatagatttctgattaaattcattttgaattttcatatttatctggtggactgacctttttatttatcattataaaatgtcattctttatcattagtaatgtgtttgtctgtagtctttctgtattatattttaggtgtatctcttataaacagcatgtagtttatgttttaagaagccagcttcacagtctttatttttaattgtagcatttagacagtttatatttaatacgattactctaattttgggtataaatctactctaattttgggtaaaagcacctttactgatgctttctaacattatcttcactttcttgcctttgtttggattttggaaataatttcatggtttctcctgctaattttgaaacttatgcactgtttccagtcttcttgttggattccctaggaattatgtcttttatactaacatatcaaagtttaaagttagtcagtatcttttccctcatcccagactatttagggaccttaatgcagtaagaacacccttccaattagatattattataatgtattatgctttattgctttttaaacttcataatatattgttgttattttatatagtctttgtttactagacttacccatgcattttaccactttttttcttcttaaagtaaattctttagaatttatctgcagtaagggattgctttgtttttgtctgaaaactttttaaattttgcccttattctttttaacagctttattgagatataagtcacataaccatacaattcacccacttacaatgtataattcagtgatttggggtatgttactttttttttaagttgtggtaaaatatatatggcagaaaatttgtgttttagccattcagtgtacaatttagtgtaaagaatgccatcattgtttaaagatagtttaactgtaagttatggactaaatatttgtctccccagaaaactcatgtgttgaaatcctaacccccaaagtgatggtattaggagatgaggcctttgggaggtgattaggccaagagagtagaccatgaatagaatgagtgcccttataaaagagaacccacagagctctcttgccctctttctatcgtgtggggatacaataagaagtcagtagtctacaacatggaagagagccctcaccagaaatggaccatgctcacaccttgatcttggacttccagcctccaggattatgagaaataaatttctatttataagccacccagtgtatggtacttgttatagcagcctgaactgactaatacactgtgtatagaattctaggttgatagctattttatttccatatactgcagttatgcctttgttagctggcttccattactgctgtttaaaagtcagctgccactctagatatcacttctttatcaataatgtgcccctttcttggcaggctgcttttctctctgtctttcgtggtctttcattgatgttgctatatcttggtgtgtactttttaaataattatcctgcttgggatttcttgagcttcttgaatcagaagtttgaggtcttttgtcagtttaaatattgcctttgtcacaatctctcctctgcttttgaatctttaattaaatatatgttagctctcactctgtctcttaatctcaatgtatgtctgtattttngtgtttctatgctgctttctggataatttcttcagaatgttcttatatttcagcacttctagtctcctgttcaattcatatatccactattatggattttacattcattttactgtccattttacagctcaggaaactgaggctcagtcaggttgtgtaatatncctaagattactcagcttgcaagtaaaatagatggcagtcaaaacaagcactgtctaactgcaaaccccaggctcctgactaatgtgtttccagtgagcaatgttttatggtttttagcacatttactttggatacttatgtataagctcatttgtcatttttcaacctatactttaaaaaatttaagatctcaaatttctttttgatttgcagcattttcattgtcttaaccagctttgccaaattcatttccaatttcttttggtctctttctacaaatatatgctaaagatttttcatcgaattttccacaaattcccacaaaagatactgcaacagtgatgaaaacaaagtctttctttgatgctctatagacataagcatgtatttgttttatttttaggtatgatttttatagtatttttcatttttatgtataattgcttttatttttaggtatgataagtcaaaaatgtcatagggagtatcattgccctaagagactctggtaagaaatttatcaaatgaatgttccatacagaaaattttgaaagagtactacagcaaattttcaaggttgaagacactctgtatgagcagggtgatggaattcagccatttctcatttttatttctcacacgtctttgtgttcctgcatctgccttcagggaagtcgtgtctgggagtctagcaaatttaatagacatatgggtcacgacttagcacttatgttatccaagagtttggttttgattcccacatatagaagagtttctgcacattgttataggaaatataacttttaaaaagctgatgtttgtgagctgcttgtgtacaggaagaagaaactaaaaatgtcttatgtttggaaagtcacacaaatcttaaatcatgattaaaagaggaatcagttaaaatggtccctagttatatgggtgtggctgtggtaaatcattacttttaccctcaagaacaaaaccctatatatgtcaaagacctagggaaaagtaagagttttattacctatcaaaaatcagtatttaggagagattcaactgtatttatattcatcatcatagtattttgaagtactcacttcagcatgaaacataggaaattccaattttacagcatttgcgatcgtgcgttttcttgcttaagacaatataacctgcagagtgtaataccttgacatcactgggtcttccaaacaagttgccgtaaaacataaactatgattattgagtcttaaagaaattatttgctcatgggtactcaagtgatttgaaagttgggatctaagaccacgttaatgaacagaatttgctactttgtatcaacttggaaatatatttcttatttaattttgtagaacaaatatacttcctgggataagtggaggatatattaagtaccctctgatgaattttttcagtgtctagttaacttaacgtttaaattttcaatttgaagaaataaactgggaacagtaatgggacaacagggtgctaacccaataaaaaaagtcactttcagtttgttagtgcatatttatgttgcaatgtaagtttcataattaagtagtgaatctaagttaaaattctgtttacagtttttgcaaatttcaccttggagaattgttgagtgaattgtttgcttcatttgaggatgtagaataaattatattttccataaaatgtcaccaacagtgcttatttccaaacaaaaaataattatgtatgtggctaggtctactcactttgtaatacctcttttggggctcttctgtcagaactgaggacacttacagtatctagagccttttctagggaatataacaaaagcttttctccctcttctagcccccacaaattttacatcttgctgccagcgtatctttcaaaataataacaaggtagtcttcttgagtagtttataatggatttctttctatgtttaataaagcaaatgaaacttaatttttaaaaaaactagaggactaaaaattattttcatgagaactaagtaaaatataattgatatttgtattagtccattctcatggtactatgaagaaatacctgagactgggagattcataaagagaagaggtttaactgactcacagttctgcatggctggggaggccttaggaaacttacaatcatggtggaaggtgaagcaaacacatcctttttcacaaggcgacaggagaagaagcgccgagcaaagggggaaaagccccttatataaccatcagatcttgtgagaacccactatcatgagaacagcatggggataactgcccccatgatttgattacctcccactgggctcctctcacgacacgtgggaattatgggaactacaactcaagatgagatttgggtggggacacagccaaccacatcaatatttaaaattgaagtacttcagttttgattagtgtagactaatacaacatgcgaatgtagaggccttttgctcactcttcccactaagaactcaagacctttgaagggtcctgacaacagacatttcagtgataatttaccaagatagcagaactgtttgttgctaaaaatagttatgcaggataaaatgcaatctataattttatgagaacctgtgattctagtttacctccaattactaatatccatatctatgtttgtatattttttaatcaggtgtgttttggactcagaagttattaaaaattcagtcaaatgatgggagtgatgttttgaagattagaatcatgtagctgattcacatgcgttattagaccatgataagaagcacagaggaaatataacaaatgaaatcagccttcttgcctactgattctgcataattttaaaaattaaatttgggtttttgtccatatgcaaatttgtcctaaaaatttccatcttttgaaagcgttttgatacttagaaaaaaaaatttaagacttttctaaatagaatatacaagatggtacaatctgattggataataatgcatcagtgttctaagttaataattgtctaaggcaataattaacatttaaaacatgcagtgacatcatttctgaatttttttctactttctacttatcaaaatgccaaatataattatacacaattactgcttaaagatgatgaaggttttgatttcagaaagttcatcactcttaccttttcacagagaatttaatttgatgatctattaaggcacaacaggtgtctgatttagcatatttgactattttcacaagtcacaatccatctaacaaggacagatgttcccagtagaggtcagtcttgtgttgatagttattgtatcataaaggaaaaactagggattttatgtttaagtccagtatatttgatataggtagtaagccattaattgtggaagaaagaaacttaaagattggtcatctttattgtaacaaaaattactgtgggtaatattttgggtcctttattaccatatgttttcctcaaaaccccagaaagcttaactgcttgctaaatactccctaaaaggaacttaccaatggtagaaatgaacaattatctaaacgtagcaacagataatttgggataaatgtcagattattggatttgaaactgaaaatatttcttgcaaatttcagtttgagaagagaaacacagaggtaggataatttcacgcatcagcccctcaccttagctgtcttctctgcaatatggggacaactgtgcttgttctctttccctcagataaatcttgttttattcctcagactaatgttttggtctataaaccgagaattttataataaatgcggagatggcaatcggagataaagcatatgtttacaagtaatgcctttggagttgttgatgccaaaatacaataagcagtcaaaccagcatagcccaggaaacatctttgaggttactgagatgataaatgactttactgcaggtagatggtgtgatggaaagagcagtgtgttagcagcagtggttctgccaccagatagcttgaggaggctttaatttcccacaccttaaataaacataattaagtaaactgtgtttgctatgcaaatacagtctaaaagcaagactcctagttccttctttcgaactaaattattacccaacggtccttcctattagaatttgtagcaccaatattagttagaaatcagaatatttggattttaacttgtggcactgccagttgggcaagtgaccttgagcaagtcacaacctctctgagatttgtctttttctcagtaaagtgaagggattggatatggaaggaacaaactccagtgttttccaggacaggaagatattagaagttgctgagaatggaggggtcagtggagaaatggagtgtgcagaccttacaataaggtatctgatagaaacaaagtgttgaatgctctatgttggccaaacttatgctttatgtagaggtgggcagacagatgcaggtaagaaaactgggagagaggtgcccagttacaaatgcaaaacttcaactctggtcttctgtccgatgatctggagttcttcccacttcgccacactaagtcttgtcgctgacaggagtgtgtgggcttgatctaagcaaatctctgaaagagagggcttatatttggttccctttatcctccatctatgccccttctttattttttgggtccctttctctttatccactacatccttagttgtgctcaggtgtttcctgagcatgagctttgtaggcgacacatttcaggagctgaaacagcccagaccccacctctcttttcaggctccccactatgatgttgacatttgccctccacagagcttataccaggctgcattatgtttcttcatgaagactagttagctaagcaagtacttagagccctttcattcattcagtttattgtagagccttaatactgcagatgctaggctgggcaatgatgaagggagaaagacggctttaactctgaaggagcctcagcccaatgaggaaagcaatatgtctacgtgtaactctagatgatgaaatcagacccctgtagtgtgcagggtacacagaggagagataatttttccagggcagtggagggatatgcaaggtgttactgaggagctaatattcaagctgaaccctgaagaatgtgtccactagtgaggaaggcagggcagaggcattttctcagaggaaatagcatgaaataggatctggtgacaactagaaatgacttaccattccatgtggtccaggtaatgctaatacttcaatataaagtctgacatggctctctgtaaaggactgagtaataaggggatttcatgaactgtggccaggcaggcagcggacttatttttaagtaaggagttttttggcacctgtcaaataacatctccgagatggcttcctttacatattccaggtcagttgatccagatctcaatgctctttgcaatttttggattcttagtaggttgctgctacaccatggtttctctttccacattttcacagggcattcctgcattagtctgtactgatgagtttacaatggttgcaataattgttggtgttgatgaaccttccttgcactttatgtaaaagagtgatccttttattgccagtttctatttttccatcaacagcctgatattccatgcctctgggtccatactgttccatttcataacatttaatgaatgttagaagtggctctgcaaatgcattgccttaatcttgttgcctgcagtgagatgcttttaatattttctccacatgtgaactcagtgttttcctttaggttttctttaatttccatgtggttaatgtcactactgcagggagcctggatatttatagatttttccctttcactctatcttcaataatttgcttttgcattcagtgaacacatccatcacaataaatggtccttttctcatttgtattgacttgcatttatataaaccagacttcctttttatagtattatcaatgttcatggcaattttcagtagcttggggagctgggtatgagagttggcacagagctgcaagttttcaaatgactcatgtcatgatgcctggtttcaagctttatcattaagtcaagaccaaagttatatgggtttttttccttaattgcctcaatataaaatgagagtattaaataagcatctctaaattattcccaatttcattaaaatgttcttgatttgatagcccttttgtgcactgaaagatgtaaaatattccaattacattgttgactattcatagtcagttcaatgttataaacttgtatagctcctagtagaaataaacagggaactgagttatatacagttcatattgatcattcttagatgctattgctttctgatagctcaatttattttaacagagtctacaatgatgtcattttaaaattattattttaatatttcatttatattcttttaatataagttaattttttcctatcactgtgcatgtcattggtttgcagattgttgggaagaatatcactggcaggacttgtattgctgttctttaggcaaaagcaaactggtcaacctaatcaaactttttctagcttgtggaaggcctctcagaaaatatctttcagaagtagctctgtgtgctcagacccctggaaccagtcattctgctgcaacagaggcctgtgctttcctattgccacccattttcactgctcagtggcctcttcagatattagtgctatttccataattctagttgcatatgcttttttgtttcttacctatgccacttaaatattgtgacattttgggagcacttaaacatttacttcaaaacttcacatctttgtggtatttttctatagtaacttgtggttgttagaaatgctgaaaataaatggtgctgggataactgggtagttaaatgtggaacattgaaactggacccctttctttcaccatatagcaaaatcaactcaagatggattaaggatttaaatataaaacctaaaactataagaatcctagaagaaacccaggaaatacccttctggacatcagacctggcaaaggttttatgatgaagattctaaaagcaattgcaccaaaaccacaaattgacaagagggacctaattaaacaaaagagcttctgcacagcaaaagaaactctaaacagaataaacagacaaccaacagaataggagaaaatatttgcaaactatgcatctgacaaaggtcaaatatccagaatctataagtaacttaaacaaatcaacaagcaaaaaaacaacccattaaaagtaggcaaaggacatgaacactcatcaaaagaagagagatgaatggatgaatggccaataagcatataaaaatgctccacatcactaatcattagagaagtttaaattaaaaccacagtgagataccgctcataccagtcagaatgactattcttaaataaaagtaaaaaaataacatgctggtcaggttgcagagaaaagggaatgcttatacaactgctggtgggaggtaaattagttcagccacagtggaaagcagtttggctatttctcaaagaacttaaaacagaactaccattcaatccagcaatcccattactgggtatatgcccaaaggaatagaaattgttctaccatatagacacatacatgcttatgttcattgcagcactattcgcagtagcaaagacatggactcaacttagatgaccgtcagtgatggactagataaaggaaatgtggttcatatataccacagaatactatgcagccataaaaaagaatgagagatcatgtcctctgctggaagatagatggagctggaggccattaacctaagcaaattaatatgggagcagaaaaccaaataccacatgttctcataagtggaagctaaacattgagtacacatggacacaaaaaagggaacaagagacactgagacctagttgagggtggagggtgggaggagggtgaggattgaaaactacctatggagtactatgctcattttctgggtgatgaagtaatctgtaccccaaactcctatgacatgcagtttacccataaaacaaacctgcacatgtaccccccgaacctaaaataaaagttggaatggcaaaaaaagaaatgctaaaaatatattatttcattatcccaataagctcttacagtaatttttttatctgtgtggcttttttggggggtatatctccagtataatttaaaataatcagttaatttttgttttctggattcagtcatctttactaccatattaaattatttcgaagacatattttttttctccacattttagcatctctgaaactagaatgcatctttcaattaaggatgtatcacagtttaattggaagcattttttttgtagtggtagaaaaattagttgtgtcctagatttaataaaatgtggcattttatttttattttccaaggacagataatggaaggtggttcatttgtttatgctttgagtaagcattcctgagtattctctgagcttcttttctgtcccaatcttttctatgcaagtctatcttctatcttgttcatttatttattcattctctgcaattagtagaagtatttaacagaaggtaaaaacatttgaaatttttttactctnctctcctaaatttctatgcatatgactttatacctggtcaggccaaagaatttttgtgtagcaggggatgggagaaggagaaattatgggaatagtggtgggattaggacttttataacaagaatgcaaagaagaaccagtgttcagcttttaattactgtaggatgtttctaataatgctggcaatgaggaaagcttgactttgtcaggagaaggaaggattttctaaatttctttaaagctcagatatgtagtaaaagaaaaatttctagaatttcttccagagtctcaaggtactggtttatctagaaagaatgatttggattagagcaagtagatgccctccccttttggtctcatggaataagagtccctgttttttccttaaggtccttgcttttccccttcttaggactgtgtctcaaatggggtgaatgtagaaacatcaggaaaggcatggaggagtctgagaacatttgagctagtggtctgctcctctgtcaaagcatgagggagcacacagacattagttggctccacttcaggcttcaggtctgggacacaatcaatagtgagagagcaatgacatggaggtaaccttggagacagctagaaggattgagactgaggatgtgctcctggctctccagggcctgcgcttggtgtgcagggtattgtgtgggtttccatgcctggagcttttctactgcctcagggacctctgaggccaacagatcagaaaaggctgtatcagagtgaagagactgtaatagaaggagcctttaagactagaggccaggatcagtttctagtagtgtttgtcagcattttccaccccaaaccaagtgtgaacagttttactcattgtaactggtccagggagctgagcaacttacctacctgcagtagaatacagtggagattcagagaacatctcttgaatctgaggtctgcctctctctgtctctgtctctctctctctctgtctctcccttactctgtctctgtctccttccaaaaagaataaagtaaatgtcttcacatacctagatgccatctttgggaggagaagagggtagggacagaactctgaaatgcaagtgtatctgtttgggttcaatcagaagatagagaacatacagtaatctgaacaggggaattttaatataaagataactattaatataaatataattactaaacaaaaataaaagagtagctataagatgtaagaaaacacattattgtaccctgtgactgaatgagagtagtcaggaaagacaaactcggaaggagagccctcttcttgaggctggagttcagacctcactggagaacacgagatgcagatctctggatgttagaggagtttccctggtttgcccatgccagagctggtctgtagtcactgggcaagcagaagtaatcctctggagtgcaggtggggcacaggtgagctgcagctggtggctgggtgggtacgcatgtagagagaatggggatgctggtggcaaccctctggggagtggcagttttcagttacccatggctgtgtaagaggagtgtgctgagggtttgggggtaccagtgtaggcaagaggcctagagtgtgcagtatgcagattgtgagggtgtgggaaggtgatcaggagtcctggcctacgctgtaaggtggccaagggactgcaccttctggactaatggctgaggcagaacaccactggagtcctcacacccacaccgctggcccactgtgcagcagcaagaaacagcagaagagtcatttcctccggcattgcccctccagcacctttaactgtgagagtttagtatcatacacactataaaggagaaatgcttaaaggaattctgttcattatcacagagcatgtattgaatggtgaatttggaactgaaaggtggtaagttgataactggcacaataaatctttattcagaagagactaaatcatccaaaagaaattctaacagctggcactcttttaatgggcttccaatgaacagagttgttggattaaccaatgcattctgtatcctccataaaattgtatatagattcatgtccactgtgtggtgttgactcatagccagttggctgtgctctagtataccattgtacctatgtttccataccatttgggagctgtgtttattctccatatgtttatactagttgtattaagtatctatttattccaagtctatttatagtagttgtattagttttctattttctaacatatttttatttctattttataacagataatctgaaaacttagtgacttaaaacaacaataacaacagtggacatttagtctgccacagtttctgcaaatcttgaattctgttttgcataatctgggtagttctgacttgggggtttctcagatgttgcattcgagttactggatgggcctgcagtcatctgaagacttgactgcagttgtaggaaggaattccaaaatggctcactcatgtggttgacaagctgatgagggctgttgccaggagcgtcagtttgttgccatggagatatctccactaactgagtaccctcatgacatgacagttggcttaccccaagttgggtgatcttaaagatagtgaggcagaagccacaatgccttttataacagtctcaagaagtcacgaagtgtcatttctgcaatatcctgttggttacacagctcaccctttttaatgtagaagaggaccacacaaaagtgttaataccaggagaggccactggaagctgtcttggctactggctaccacactaatatctgttattgtaatcacaaaatttaattaaataccataaaaacaattgaaatatgaatataaaagtatttttttataaaaactaagtgctttcaaaaaacttcttaaagtataaaaaaatctgttgtataaaatgaggctaagacaactaagaaattgaggatattttgtaaaaatctggatggattctgctcccaagtaactttgcaagtgacatgaactttttttattccactttaaagaaattaattggtgatgcaaaaagttttggagtaataaatggcttgaatgttaagggaaaaaaatacccaacccagcatgatacccatatactaagcaccattagggagaaattatcttgctgttctaaagagtaatgaagttaatgtcaattcttgagagataacatttgattgaagaacaagtctacaataccacatcataagctattatctacaaaaatggtaataagagcataggtatgaggttttaataaataatattttacaacaatcagtaatatttgcagcaatgcaactagagtaaaaaattgctgttattggcaaattgacaaaagaggttttagaaataaaaaatatattattaatctaactacagtaccaaaaataaatttggaagaatactgaagttttcatctatcatgacagtagagattaaaaaaaaatcaaaaaacaaccacccaagccatggtgcctatatcagttttcaattgtagcttaaccaaaatcaccctaaaatttagtagtttaaataaatggtttatacaacaatcatattattatctctcgggctctctgtgagtcaggaattcagacagagtacagtagggatgatgggttattttcccactgtgtatagagcctcatctaggaagacttgtaggctgggaatgactcaacagttgggggtctggaatcatctggtggaatctacattcacttgtattgcagttgattctgcttatcatttggaattccagctggtcttgctaaagcacatacacatggctcttccatgtgacctctgtgtttgtttgggcttccttacagcagggtgggtgccttacaagaataaacatcactgagaaaaccagaagaaagctgtattgccatttaggaccttgcctttggaagtctcacagctttactccctttgtaggctccatcttgctcagattcaggtggagggaccatatacaccacatcttgataggagggtgggtatcaaagtcacactgtaagatggtcatgcaggatgggaaatactattgtggcagtcttggaaactgcaatctgtgcacatacacacacacacacactgggaacaatcttacttcctaactgtatgaaccttaaggatgaagatatgtaaaggccatatttttaccactgaatatcatgagaaagtgttttagttccattttgaaaagatggaatatgagaagatgagtttatagaattgataaaattcctcgttgatatggtttggctctgtgtgcccatccaaatctcatgttgaattgtgatcctgagtgttggaggaggggcttggtgggaggtgattagatcatggaggcagatttcccccttgctgttctcatgatagtgagttctcatgagacctggttgtttaaaagtgtggcacttccccattctctcactctctgtctcctgctccaccatggtaagtcatgcttgcttccccttcgccttctatcatgactgtaagtttcctgaggcctcccagccatgcttcctgtgcagcctgaagaactatgagtcaatgaaacctcttttcttcataaattaccaagtttcaggtggttctttttagtttagttgagaactaatacagaaagttggtaccagagaagtggggcattgctataaagatacctgaaaatgtggaagtgactttggaactgggtaatgggcagaggttagaagagtttggaaggctcagaagaagacaggaagatgggaaagtttggaacttcctggggacttggtgaatggttatgaccaaaatgctgatagtgatatggacagtgaagtccaggctgaggtggtctcagatggagatgaacttgttgggaactggaataaaggtcactcttgcaatgcttcagcaaagagactggcagcattgtgcccctgctctaaagatcagtggagcggctggagccaagatggcagaataggaacagctccggtctacagctcccagtgtgagcgatgcagaagacaggtgatttctgcatttccatctgaggtactgggttcatctcactagggagtgccagacagtgggcgcaggtcagtgggtgcagcacaccgtgtgcgagctgaagcagggtgaggcattgccttacttgggaagtggaaggggtcagggagttccctttcctagtcaaagaaaggggtgacagatggcacctggaaaagcgggtcacttccaccccaatacagtgcttttcagatgggcttaaaaaatggcacaccaggagattatatcccgcacctggctcggagggtcctacgcccatggagtctcactgaatgctagcacagcagtctgagatcaaacggcaaggtggcagtgaggctgggggaggggagcccgccattgcccaggcttgcttaggtaaacaaagcagccaggaagctcgaactgggtggagcccaccacagctcaaggaggcctgcctgcctctgtaggctccacctctgggggcagggcacagacaaacaaaaagacagcagtaactctgcagacttaaatgtccctgtctgacagctttgaagagagcagtggttctcccagcacgcagctggagatctgagaacgggcagactgcctcctcaagtgggtccctgacccctgacccccgagcagcctaactgggaggtactccccagcaggggcagactgacacttcacacggccgggtactcctctgagacaaaacttccagaggaacgatcagacagcagcattcgcagttcacaaaaatccgctgttctgcagccaccactgctggtacccaggnaaacagggtctggagtggacctctagcagactccaacagacctgcaactgagggtcctgtctgttagaaggaaaactaacaaacagaaaggacatccacaccaaaaacccatctgtacatcaccatcatcaaagaccaaaagtagataaaaccacaaagatggggaaaaaacagagcagaaaaacaggaaactctaaaaagcagagcgcctctcctcctccaaaggaacacagctcctcaccagcaacggaacaaagctgtatggagaatgactttgacgagttgagagaagaaggcttcagacgatcaaactactctgagctacaggaggaaattcaaaccaaaggcaaagaagttgaaaactttgaaaaaaatttagacgaatgtataactagaataaccaatacagagaagtgcttaaaggagctgatggagctgaaagccaaggctcgagaactacgtgaagaatgcagaagcctcaggagcctatgctatcaactggaagaaagggtatcagtgatggaagatgaaataatgaaatgaagtgagaagggaagtttggagaaaaaagaataaaaagaaatgaacaaagcctccaagaaatatgggactatgtgaaaagaccaaatctacgtctgattggtgtacctgaaagtgacagggagaatggaaccaagttggaaaacattctgcaggatattatccaggagaacttccccaatctagcaaggcaggccaacactcaaatttgggaaatgcagagaacgccacaaagatactcctcgagaagagcaactccaagacataattgtcagattcaccaaagttgaaatgaaggagaaaatgttaacggcagccagagagaaaggttgggttacccacaaagggaagcccatcagactaacagcagatctctcggcagaaactctacaagccagaagagagtggggacaaatattcaacattcttaaagaaaagaattttcaacccagaatttcatatccagccaaactaagcttcataagtgaaggagaaataaaatactttacagacaagcaaatgctgagagatttcatcaccaccaggcctgccctaaaagagctcctgaaggaagcactaaacatggagagaaacaaccggtaccagccactgcaaaatcatgccaaattgtaaagaccatcaaggctaggaagaaactgcatcaactaacaagcaaaataaccagctaacatcataatgacaggatcgaattcacacataacaatattaaccttaaatggaaatggactaaatgctccaattaaaagacacagactggcaaattggataaagagtcaagactcatcagtgtgctgtattcaggagacccatctcatgtgcaaagacacacgtaggctcaaaataaagggatggaggaagatctaccaagcaaatggaaagcaaaaaaaagcaagagttgcaatcctagtctctgataaaacagactttaaaccaacaaagatcagaagagacaaagaaggccattacataatgtcaaagggatcaattctaccagaagagctaactatcctaaatatatatgcacccaatacaggagcagccagattcataaagcaagtcctgagtgacctacaaagagacttagactcccacacaataataatgggagactttaacaccccactgtcaacattagacagatccatgagacagaaaattaacaaggatgtccaggaattgaactcagctctgcaccaagcggacccaatagacatctacagaactctccaccccaaatcaaaagaatatacattttttttttcagcaccacaccacacctattccaaaattgaccacatagttggaagtaaagctctcctcagcaaatgtaaaagatcagaaattataacaaactgtctctcagaccacagtgcaatcaaactagaactcaggattaagaaactcactcaaaactgctcaactacatggaaactgagcaacctgctcctgaatgactactgggtacataacgaaatgaaagcagaaataaagatgttatttgataccaatgagaacaaagacacaacataccagaatctctgtgacacattcaaagcagtgtgtagagggaaatttatagcactaaatgcccacaagagaaagcaggaaagatccaaaatttacaccctaacatcacaattaaaagaactagaaaagcaagagcaaacacattcaaaagctagcagaaggcaagaaataactaagatcagagcagacctgaaggaaatagagacacaaaaaacccttcaaaaaattaatgaatccaggagctggttttttgaagagatcaacaaaattgatagaccgctagcaagactaataaagaagaaaagagagaagtatcaaatagatgcaataaaaaatgataaaggggatatcaccaccaatcccacataaatacaaattaccatcagaggatactacaaacacctctacacaaataaactagaaaatctagaagaaatggataaattcctggacacatacaccctcccaagactaaaccaggaagaagttgactctctgaatagaccaataacaggatctgaaattgtggcgataatcaatagcttaccaaccaaaaaaagtccaggaccagatgaattcacagccgaattctaccagaggtacaaggaggaactggtaccattccttctgaaactattccaatcaatagaaaaagagggaatcctccctaactcatttgatgaggccagcatcatcctgataccaaagcctggcagagacacaaccaaaaagagaattttagaccaatatccttgatgaacattgatgcaaaaatcctcaataaagtactggcaaaccaaatccagcagcacatcaaaaagcttatccaccatgatcaagtgggcttcatccctgggatgcaaggctggttcaatatatgcaaatcaataaatgtaatccagcatataaacagaaccaaagacaaaaaccacatgattatctcaatagatgcagaaaaggcctttgatagaattcaacaacccttcatgctaaaaactctcaataaattaggtattgatgggacgtatctcaaaataataagagctatctatgacaaacccacagccaatatcatactgaatgggcaaaaactggaagcattccctttgaaaactggcacaagacagggatgccctctctcaccactcctagtcaacatagtgttggaagttctggccagggcaattaggcaggagaaggaaataaagggtattcaattaggaaaagaggaagtcaaattgtccctgtttgcagatgacatgattgtatatctagaaaaccccatngtctcagcccaaaatctccttaagctcataagcaacttcagcaaagtctcaggatacaaaatcaatgtacaaaagtcacaagcattcttatacacaaataacagacaaacagagagccaaatcatgagtgaactcccattcacaattgcttcaaagagaataaaatacctaggaatccaacttacaagggacgtgaaggacctcttcaaggagaactataaaccnntgctcaatgaaataaaagaggatacaaacaaatggaggaacattccatgctcatgggtaggaagaatcaatatcatgaaaatggctatactgcccaaggtaatttatagattcagtgccatccccatcaagctaccaatgactttcttcacagaattggaaaaaactactttaaagttcatgtggaaccaaaaaagagcccgcattgccaagtcaatcctaagccaaaagaacaaagctggaggcatcacggtacctgacttcaaactatactacaaggctacagtaaccaaaacagcatggtactggtaccaaaacagagatatagatcaatggaacagaacagagccctcagaaataatgccacatatctacaagtatctgatctttgacaaacctgagaaaaacaagcaatggggaaaggattccctatttaataaatggtgctgggaaaactggctaaccatatgtagaaagctgaaactggatcccttccttacagcttatacaaaaattaattcaagatggattaaagacttaaatgctagacctaaaaccataaaaatcctagaagaaaacctaggcattaccattcaggacataggcatgggcaaggacttcatgtctaaaacaccaaaagcaatggcaacaaaagccaaaattgacaaatgggatctaattaaactaaagagcttctgcacagcaaaagaaactaccatcagagtcaacaggcaacctacaaaatgggagaaaatttttgcaacctactcatctgacaaagggctaatatccagaatctacaatgaactcaaacaaatttacaagaaaaaaacaagcgaccccatcaaaaacaaaagccaaaattgacaaatgggatctaattaaactaaagagcttctgcacagcaaaagaaactaccatcagagtcaacaggcaacctacaaaatgggagaaaatttttgcaacctactcatctgacaaagggctaatatccagaatctacaatgaactcaaacaaatttacaagaaaaaaacaagcgaccccatcaaaaacaaaagccaaaattgacaaatgggatctaattaaactaaagagcttctgcacagcaaaagaaactaccatcagagtcaacaggcaacctacaaaatgggagaaaatttttgcaacctactcatctgacaaagggctaatatccagtatctacaatgaactcaaacaaatttacaagaaaaaaacaagcgaccccatcaaaaagtgggtgaaggacatgaacagacacttctcaaaagaagacatttatgcagccaaaaaacacatgaaaaaatgctcaccatcactggccatcagagaaatgcaaatcaaaaccacaatgagataccatctcacaccagttagaatggcgatcattaaaaagtcaggaaacaacaggtgctggggaggatgtggagaaataggaaaagttttatactgttggtggcactgtaaactagttcaaccattgtggaagtcagtgtggcgattcttcagggatctagaactagaaataccatttgacccagccatcccattactgggtatatacccaaaggattataaatcatgctgctataaagacacatgcacatgtatgtttattgcagcactattcacaatagcaaagacttggaaccaacccaaatgtccaacaatgatagactggattaagaaaatgtggcacatatataccatggaatactatgcagccacaaaaaatgatgagttcatgtcctttgtagggacatggatgaaattggaaatcatcattctcagtaaactatcacaagaacgaaaaaccaaacaccgcatattctaactcataggtgggaattgaacaatgagaacacatgaacacagaaaggggaacatcacactctggggactgttgtggggtggagggatgggggagggatagctttaggagatatacctaatgctaaatgatgagttaataggtgcagcacaccagcatggcacatgtatacatatgtaactaacctgcacattatgcacatgtaccctaaaacttaaagtataataataaagtaaaataaaaaaaaaaagaagttttacatataaaaataaatacatatgtaaagatctgtagaattttgaacttgagagagataatttagggtatctggtggaagaaatttctaagcagcaaagcattcaagagatggcctgactgcctctaaaagcctaattcatttgcataaacaaagaaatgacctgaaactagaacttgtatttaaaagggaagcagagcataaaagtttggaaaattttcagccagaccatgcagtagaaaagaaaaacaattttctagggaggaattcagggctgcagaaataagcataagtaacaaggagtcgaatgttaatagcaaaaacaatggggaaaatgcctccaaggcatttcagaggcctttgtggcagcccctccaatcatagtcctggaggtctagcagggaaaaatggtttcatggaccaggcccaagaccccgctgctctctgcagccttgggacatggtgccctgcatcgcagctgctccagttccagctgtggctaaaaggggccaaggtatagcttgggctgtttcttcagagagtgcaagctccaagccttggtggcttccaagtgtattgggcctgtgagtgtgcaaaaggtaagcgttgaggtttgggaacctttgcctagatttcagaggatgtatggaaactcctggatgtccaggcagaagtgtgctgcaggggtggagccctcatggagaccctcttctagggcagtgcagaggggaaatgggaaatgtggggttggagcccccacacagagtccctcctggggcactgcctaatggagctgtgagaacggggccaccatacttcagacctcagaatggcagatccactgacagcttgctctgtgtgcctggaaaagctgtaggcactcaacaccagcctgtgaaagcagccatgggggctgtattatgcagagccacaggggtggagctgcccaaggacttgagcccactgcttgcatcagtataacctggatgtgagacatgaagtcaaaggagataattttgaagctttgagatttaatgactcccctgctgggttttggacttacatggagcctgtagcccctttgttttggtcaatttctttcttttggaatgggagaacttactcaatgcctgtactctcattgtatcttggaagtaactaacttgtttttgattttacaggcttataggcagaagggacttgccttgtctcttcaaagagtctcatctttgtctctcataaaagatgagactttggacctacacttttgagttaatgctagaatgagttaagactgttgggaaggcataattgtgttttgaaatataagaaggatatgtgatttgggaggggccaggacagaattatatggtttggctttgtgtccccacccaaatctcatgtttaattgtgatcttaagtgttggaggtggggccttgtgggaggtaattagatcatgggggctgatttcccccttgccattctcatgagacctggttgtttaaaagtatgtagcacttccccctttgctcactctcctgctccactatggtaagacatgcttgcttcccctttacctctgccatgattataagtttcctgaggcctcccagccatgcttcctgtacagcctgcaggactgtgagtcaattaaaactttcttcttataccatttgatccagcaatctcattactgggtatatacccaaaggattataaatcattctactataaagacacatgcatacgtatgtttattgcaacactatttacaatagcagagacatggaaccaacctaaatgcccatcaatgatagactggataaagaaaatgtggtacacatacaccatggaatactatgcagccataaaaatgaatgagatcatgtcctttgcagggacatggatgaagctagaaggcataatcctcaccaaactaacacaggaacagaaaaccaaatatcgcatgttctcactcataagtgggagttgaacaatgagaacacatggacacagagagcggaaaaacacacatccaggcctgttgggatgtggggggtgaggggagggaacttagaggataggtcaataggtgcagcaaaccaccatggcacatgtgtacctatgtaaggaacctggacattctgcacatgtatcccattttttagaagaaatcaaacaaacaaacaaaaaactcatttccttgtaaattgctcagtctcaggtagttctttatagtaatgtaagaaaagactaacatcaaaggtcactattcacagtgcagtactggagtgaaatgtgttaagaaaaagatttcctaaacttggaaatagccatattggagaaatgtgcaacagatccatcattgatgatttaattatttaaggctgttaactttgatttaacgctattgattgggatatttacaactctatgcatagatggtgacttatgaaaactgagagtggtgcaaataaattcttcccagtagaaaagaacactccaggggatatagttaatgcaagacattaaccagttttatatctcttttagcattttttattcagtcatcttttttcaataactataaatacttctgcttctgctgtattcttttttctcaccttttctattttattggttcccataataatgagttaaataaatctttgatacatgcttactttattttatatgagagtcaggtttttaaaattatactttgacaaatgaaagtcctcagtgaacatgtactacatcttgaaaaaagggatggcctggggctgataatactataaaacaagagttgacagactatggccccatgggtcaaatgcacttgtaagaacgttttattggaacatagacacactcattgattatgtcttgtctatgggttttgttctgctatagcagaattgagtagttgcaactatgatcatatggcccataaggcctaaaatatttattatctggccttttacagaaaaattttgctaaattctgttataggaaatcctgaattttaagactaatcatgaacataatttgttaatcgttctcagaaaattgacagcactaatgatttataagacatcaaacaatagaatatttaatttgatttactagaaaattatgaataatgcagaataatatatactctgaattaaacttattgatctcaatttggaaaacagaaaacaatgaagagatataatcaaatctagagccaaaagtggccaataactacctaaatattaccatatattaaacatcagatggaatcaactgtcaagaatataattaaaaaggtggaaggactatgctgtgaaaaaaatctatcatcttaacaacttgaactcatttttattaaatgtatatacatttagtttaaatgaaaatatagtatttgtgttatatactttatttctcactttgactttttaattaaatatgtcttgatttcatcagataagaaggcatctggtgtattaagttttgttaattgaaaaatctcaacttttttattgcccagcagggtagaggcttgctcagaagcttggactagcaaacataactagctttttttttttttttttgtctttccttctcttttctctcctgccaccttaatgtagggtgaatgaatttgccacctcaaagctatctacaatgggtcaggcaaaataaccacaatatgggtttgtacataatttgggaaggagttcttctcctgtcccttcttcctttggcaatgcctcttaaatcacagttgtgttggttgaacagctctatgaatatatgaaaagccactgaattgtgcacttaattgggtgagttgcatggtatgtaaaatacatcttaataaagctgacaccccaagaaaatcacaggagaaaaaaaatcgtaccgagttaatggtatataatgaaaaagaaaaattgatgttcagtgcctactgtgtactagaaacttacaaatggacagatatatgagtatcaaaatcaaaagtgcacagcaacctaaaacagctctgtcacccaggctgtagtgcaatggcctgatcatggcctattgcagcctttgccaaaggagctcaagggctcctcccaccccagccttcggagtagctgggactacaggcatgcaccaccatgcctgggctaatttttttttttttttttttgtagagatggagttttatcatgttgtccaggctggccttgcactccttgactcaagccatctgcccatctcagcctctcaatgtgctggggttagagggatgagccaccatgtctagcatagagttgtattttctaggtttaaagtaattaaattatggatctgcaagcccaaataatttttataagttataatttttcttattaattataaagtattcccagggactctgtgaagtcctgttatgtctgggctcacgtatgaggcacacaaggcaggcagtaatgagactgcttttaatctgtaaatatataagtaaacattcaaattaattccattattttaaagagtgagattaagaaatgttaaaatgcactcattttaacaatgtttccattgtgcaaaacatttttggcattatttgtctttttcaggcaggaaaaccagtgtcaaaactttataatcatgtcttatttctgtgtgtatgtgtccacataaagtattaattagcatcattgcttgtttccaaatgccttttgtctgtttcaaaactcaaatctaccattaaaggaaaaaaaaattcacacaattgagaatattccaaagaatgggcctaatggggatcacagaactgattggaagactgagactgaagatctaggctcagaaatttggcatgaatcttggcagtaggtgacacagttcaggtcacaccacaaagcaatctggtgtagcatgtctcactggcatggccaccattagactttatcctcactagcaccaattggcaatggagtgttgtaccacttcctttagatgcagtcatcccaggtgggagtgttcgtgcaagccaagcttatgtgccatgcaccagatgtcagtggatgggggtgtgtgaatctgttaggtagcagagcacagtttgccaccaaaatatacacaatgtagcatttccccacaattgcccattaaaaatcttttacattaagcattactgacattatagaagtgtctttggattcttttattagttaaggtgagcatatattacgtttgtaattttaagtcgagtacataataattataaaagagagatttttattctttcaagtttcaggtacagagatagtctctttgcttcgatatagggtacactagagagggttgtacacctcagttcattgctccacactctcccagcagggagcatagaaccttgacctttagaacattccacttaatggtgcaataacctgtatgcagtgtaagctggtaggagaaatcaagtaagaagaggaaagaaatggccataaaatgcccacacatttcctcttcgcccccacccgcccctccaatcataagtgatgctccattgggcactctttacctcaacttaagtttcacctttttctggtttggaaagggaaaactacgtttttttgttttgagacggagtcttgctctgtcacccaggctggagtgcactggtgcgatctcggctcactgcatcctccctcccaggttcaagtgattctcctgcctcagcctcctgagtagctgggattacaggtgcccgccaccacacccggttaatttttgtatttttagtagagacgggatttcaccatgttggccaggatggtcacgaactcctgacctaaggtgatctgccctccttggcctcccaaagtactgggattacaggcgtgagccaccgcgcccatccaaactacatttttaaaaaaagttaaaaagcaaaaacgaaacaaaagttgggaaggcaagtgttctgttccatttcattaggaggctgactctctaggaacctctcctggtcgctgggaccattgttacaaggttgagaactgtgagtgtacggaaacccaggggaaacatttttcctcatttacttctcaaaatagaggtaggaataaggcatggaaaaatataaatgagtaaatataatccttgttaccttggaataattggtgataaagtgcaggtgcatcttattttcattctatcaagtcgttttctaattggatgttcttgaaacagtggctcattgcttgtacttgttcactcctattttcttgctactatcctgttttgggggcagggcaactctaccctggggaacgatcaaatgtttaggcaaatatatcctggtgttataagctcattaaatttcttgtcatttcttgcagtgtgctgggaagtgctgtttgtggcccgtttttgcaatgtagaacctctcttttgtgagagccatggaagttccttatttgataattagtctcttgctttaggcagtgccattaagaactccatataagctgccaacactttgtggatgtgcagaaccccgtaagcttcctatagctactattgcaagtaaaattttcagatgcttctgaagtcttacccacttatcttggcgtagaggttctcaagcttcagcactggaggatcacctggaattgctcgttaagacacacattgctgggatccacctccagggtgtcagagtcaagtctggggtgaagcctgagaatgtgcatgtctaaccagttcccaggtgatgctgatgttgctggttttgagactatattttgagattaagaactgccttggattaagagctgacctgcgatctacagctcaaatagtgaagtaaacatcctaaagaaaatggaaaaaccagtgcagtgagtgattgaattactatttgttcaatatcacagagagcatagtattacataagggctttggggaatattttaggtaagtatatataactcttgccacctaggatgttcatagtaactataagacagtatttttgttttccaagtaattttaatgatcctgtagatcctcttcctttttgtatataatatcaatctaatagtttcttgtttaatataaaaatgaaatcttattttacacaagcagcaagcagctattttttcagattttccccctataatctaagggaaagttattttaaaatagaaaagatgtgggcttcaaaaaaagctttgcaaatatgttgcaataatacgaatgatttcagtgttgaaatccatttgtgaaagcaggctttgcttatattttgggtcctgccttctataaaatgctcagatttgcttttattaagatcatacactcagtgacctgaggaccagatggaggttataagcagctctttaaggcttcagagcttagcctagagagtcaaacagctctttgaactggcgtctcagctctgtcatttaggcaaattgtttattttctgcaaagaaccagccttaggctttgttgatctacgtatgtatatttgttttttatttatttgcattatttcattcattctgttttctttgactttaatttgctagttttctttgaagcttgtgagataaatgcttagatcattgattatcaaaattgtgtctattctaatatatatataatatatatatgataaggctatacattttccccttagcacagctttagtagcctccaacaaattttgatgtgctgtgtttttattataaatcagtttgaaatatatattctaattttattatgatttcttgagcctatggattatatagaaatatatttcttaaattgtaaacatatggggattatttgatgtctctaagccgcagatttcctattttattttatttatttattttttattattatactttaagttttagggtacatgtgcacaatgtgcaggtttgttacatatgtatacatgtgccatgatggtgtgctgcacccattaactcgtcatttagcattaggtatatctcctaatgctatccctcctctctccccctacgccacaacactccctggtgtgtgatgttccccttcctgtgtccatgtgttctcattgttcagttcccacctatgagtgagaacatgcggtgtttggttttttgtccttgcaatagtttgctgagaatgatggtttccagcttcatccatgtccctacaaaggacatgaactcatcattttttatggctgtatagtattccatggtgtatagtattccatggtgtatatgtgccacattttcttaatccagtctatcacttttggacatttggcttggttcgaagtctttgctattgtgaatagtgctgcaataaacatatgtgtgcatgtgtctttatagcagcatgatttataatcctttgggtatatacccagtaatgggatggctgggtcaaatggcatttctagttctagatccttaaggaatcgccacactgatttccacaatggttgaactagtttacagtcccaccaacagtgtgaaagtgtttctatttctccacatcctctccagcacctgttgtttcctgactttttaatgattgccattctaactggtgtgagatggtatctcattgtggttttgatttgcatttctctgatggccagtgatggtgagcattttttcatgtgttttttggctgcataaatgtcttcttttgagaagtgtctgttcatgtccttcgcccactttctgatggggttgtttgtttttttcttgtaaatttgtttgagttcattgtagattgtggatattagccctttgtcagatgagtgggttgcaaaaattttctcccattcagtaggttgcctgttgactctgatggtagtttcttttgctgtgcagaagctctttaattagatctcatttgtctattttggcttttgttgccattgctcttggtgttttagacatgacgtccttgcccatgcctatgtcctgaatggtattgcctaggttttcttctagggcttttatggttttaggtctagcatttaagtctttaatccatcttgaattaatttatgtgtaaggtgtaaggaaggcatccagtttcagctttctacatatggctagcccgttttcccagcaccatttattaaatagggaatcctttccccatttcttgtttttctcaggtttgtcaaagatcagaaagttgtagatatgcagcattatttctgagggctctgttctgttccattggtctatatctctgttttggtaccaataccatgctattttggttactgtagccttgtagtatagtttgaagtcaggtagcatgatgcctccagctttgttcttttggcttaggattgacttggtgatgcaggctcttttttggttccatatgaactttaaagtagttttttccatttctgtgaggaaagtcattggtagctcgatggggatggcattgaatctataaattaccttcggcagtgtggccgttttcacgatatcgattcttcccacccatgagcatggaatgttcttccatttgtttgtatcctcttttatttcattgagcagtggtttgtagttctccttgaagaggtccttcacatcccttgtcagttgaattcctaggtattttattctctttgaagcaattgtgaatgggagttcactgatgatttggctctccgtttgttattggtgtataagaatgcctgtgatttttgcacattgattttgtatcctgagacttttctgaagttgtttatgagcttaaggagattttggtctgagacgatggggttttctagatatacaatcatgtcatctgctaacagggacaatttgacttcctcttttcctaattgaatgccctttatttccttctcctgcctgattgccatggctagaacttccaacactatgttgaataggagtggtgagagagggcatccctctgtcttgtgccagttttcaaagggaatgcttccagtttttgtccattcggtatgatattggctgtgggtttgtcatacatagctcttattattttgagatacgtcccatcaatacctaatttattgagagtttttagcatgaagggttgttgaattctgtcaaaggccttttctgcatctattgagataatcatgtggtttttgtctttgattctgtttatatgctggattacgtttattgattttcatatgttgaaccagccttgcatcccagggatgaagcccacttgatcatggtggataagctttttgatgtgctgcttgattcggtttgccagcattttattgaggatttttgcatcagtgttcatcaaggatattggtgtaaaattctctttttttgttgtgtctctgccaggctttggtatcaggatgatgctggcctcataaaatgagttagggaggatgccctctttttctattgattggaatattttcagaaggaatggtaccagctcctccttgtacctctggtagaattcggctgtgaatgcgtctggtcctggactttttttggttggtaagctattattattgcctcaatatcagagtctgtttttggtcttttcagagattcaacttcttcctgatttagtcttgggagggtgtatgtgtccaggaatttatccatttttttctagattttctagtttatttgtgtagaggtgtttatagtattctctgatggtagtttgtatttatgtgggatcggtggtgatatcccctttgtcattttttattgcatctatttgattcttctctcttttcttctttattagtcttgctagcggtctatcaatttgttgatcttttcaaaaaaccagcctctggattcattgattttttgaagggttttttgtgtcgctatttccttcagttctgctctgatcttagttatttcttgccttctgctagcttttgaatgtgtttgctcttgcttctctagttcttttaattgtgatgttagggtgtcaattttagatctttcctgctttctcttgtgggcatttagtgctataaatttccctctacacactgctttgaatgtgtcacagagattctggtatgttgtgtctttgttcttattggtttcaaagaacatctttatttctgccttcattttgttatgtactcagtagtcattcaggagcaggttgttcagtttccatgtagttgagcggttttgggtgagtttcttaatcctgagttctagtttgattgcactgcggtctgagagacagtttgtcataatttctgttcttttacatttgctgaggagagctttacttccaactatgtggtcaattttggaataggtgtgatgtggtgctgagaagaatgtatattcttttgatttggggtggagagttctgtagatgtctattaggtctgcttggtgcagagctgagttcacttcctgggtatccttgttaactttctgtctcatggatctgtctaatgttgacagtggggtgttaaagtctcccattattattgtgtgggagtcttagtctgtttgtaggtctctaaggacttgttttatgaatctgggtgctcctgtattgggtgcatatatatttaggatagttagcttttcttgttgaattgatccctttaccattatgtaatggccttctttgtctcttttggtctttgttggtttaaagtctgttttatcagagactagggttgcaacctgtgactgtttttgttttccatgtgcttggtagatcttcctccatcccttattttgagcctatgtgtgtctctgcacatgagatgggtctcctgaatacagcacactgatgggtcttgactctttttccaatttgccagtctgtgtcttttaattggagcacttagcccatttacatttaaggttaatattgttatgtgtgaatttgatcctatcattatgatgtcacctggttattttgctcgttagttgatgcagtttcttcctagccttgatggtctttacaatttggcatgtttttgcagtggctggtaccggttgttcctttccatgtttagtgcttccttcaggagctcttttagggcaggactggtggtgacaaaatctctcagcatttgcttatatgtaaagtattttatttctccttcacttatgaagcttagtttggctggatatgaaattctgggttgaaaatccttttctttaagaatgttcaatattggcccccactctcttctgggttgtagagtttctgcagagatatccgctattagtctgatgggcttccctttgtgggtaacccgatgtttgtctctggctacccttaacattttttccttcatttcaactttggtgaatctgacaactatgtgtcttggagttgctcttctcgaggagtatctttgtggcattctctgtatttcctgaatttgaatgttggcctgccttgctagattggggaagttctcctggataatattctgcagagtgctttccaacttggttccattctccccgtcactttcaggtacaccaatgagacgtagatttggtcttttcacatagtctcatatttcttggaggctttgttcatttccttttactcttttttctctaaacttctcaattcatttcattcatttcatcttccattactgataccctttcttccagttgatcgaatcggctactgaagcttgtggatgcatcacttagttctcgtgccatggttttcagctccatcagttcatttaaggacttttctacactggttattctagttagccattcgtctaatctgttttcaaggtttttagcttctttgcgatgtgttcgaacttccttctttagcttggagaagtttgatcatgtgaagccttcttctctcaacttgtcaaagtcaatctccatccagctttgttctattgctggtgaggagctgcattcctttgcagggggagaggtgctgtgatttttagaattttcagcttttctgctctgttttttccccatctttgtggttttatttacctttggtctttgatgatggttacgtacagatgggggttttgttgtggatgtcctttctgtttgttagttttccttttaacagtgaggaccctcagcggcaggtctgttggagtttgctggaggtccactctggaccctgtttgcctgatattaccagcagaggctgcagaacagcgaatattgctgaacagcgaatattcctgaacagcaaatattgctgtctggtagttcctctggaagcctcatctcaggtgggtacctggccatgtgaggtgtcagtctgtccctacttgggggtgcctcccagttaggctacttgggtgtcagggacccacttgaggatgcagtctgtccgttctcagatctcagactccttgctgggagaaccactactctcttcaaagctgtcagacagggacatttaagtctgcagaggtttctgctgccttttgtttggctatgccctgcccccagagttggagtctatagacgcaggcaggcctccttgagctgagatgggctccacccagttcgagcttcccagccactttgtttacctactcaagcctcagcaatggtggggcgcccctcccccaaccttgctgctgccttgcagttcgatctcagactgctgtgctagcaatgagcgaggctccgtgggcgtgggactctccgagccaggcncgggatataatctcctgatatgccgtttgctaagaccattggaaaagtgcagtattagagtcggagtgacctgattttccaggtgccgtctgtcacagcttcgcttggctaggaaagggaattccctgaccccttgtgcttcgcaggtgaggcgatgcctcaccctgcttcagctcacactcggtgcactgcacccactgtcctgcaccctgcagtgtagcaaagtttgaaatgtagatagccagaagtcagtctgggggaaagcaattccaattttcaagcttgtaaaattgttttcattgatttctactcaaatttgaaattctttcctgtcgtcaacatgtttgatgatgcctaatatgagctacaaattcactataccatttttttcttttttgctggaacatgtataaaatagaatatatctgaatttccatgtagggctgaaacatgctgtcataatagaaacaatatgcctacatctccgtctctctttctgtgtgtgtgtgtatgtatgtgtgaagtcatatgttttatgctttcctatatatcagattatgttttagcatttcagaggcactgtgtcctgctaaaatcctgtgtttccagatgaaatggcaaacattatttccagcaatgtgataaaacaaccaaagaaagtgttcaagtgacccgattcataaaattcaccaataagtcaatatatgcagtaaaatagttattacaagagtagctaagagtaattaatatgagtaagtctgtagcttaacacagtaaagtatcacttttaaatgcatttgcatttctcatgggtgagggttagcaaattctgacctggaaaccaaatccagcctactgttttatttgtaaaaaattacatttgaacacagtcctacccatttattaacttactgtttatcactgcttttgttctagaaaagcagagttgagtagttgaaaaaaagactgtggccaggcacaatgtctcataccataatcccagcactttgggaggccaaggtggatcactaactggtcactaactcttgggctcaagtgggtggattactttagcccaggtgttagtgaccagcctgggccacatggtgaaaccctgtttctacaaaaagtacaaaaattagccgggagtggtggtgtgaacctgtagtcccagctactggggaggctgaggtgggaggatgacctgagcctgggaggtcaagtaaggctgcagtgaactgagatcatgccactgcactccagcctgagtgacaaagtgagatcctatctccaaaaaaaagaaaaaaaaaaagactgtaatataagacccccaatgtcaaaaatatttactatctgatcctttacaaaagcgtttgctaactcctgtccttgtgtatgctttgatttcatattaattatatcttatgttatttatgatacatatatganatacacatatatatctaatatgttatatatttaagaattattcactatgccacaaactgtagatacaaaagaagtatctctagggaaagccaaaaacaaacatggaaagaaagaaggctagcagaagcttcaaaatatcaaaaactctcttactgtgtggcaatataaactaaaaactgatgctcaaaatcatgaagataggaaaaagaatcaagacaaccaaaaaatatggttaataaaaatgaagacagaagacatcaagatgtttatgagaaccagggtcctttcaaacagggggtgaaaaaggagtgagaagatgtgcatggcagtgaagaagaacttaatttgcacacagtcaacgggggggtgggcaggagggccaacacagctgcatttctaccacattatttattttggtaagtactgtcatcttttgttatgagccatatttcattcaacagtgtttaatgacttttttccaaatcattactccataatatttactgagaatcaaacagaacttacaatagaaaaaagagatacttcttaattagatattttggaaaaaaatcattgtcgtgtgacaagacaaccaaagagtagtcagctaaacctatagaaatgaagtattctaaaaatgtgtcagacagctaattaacacaatattttatttttctaaagatcttgcagtgtttgtcatctttatcaccttttaaaagtttgcattttattgtcacttttaaaatttttaaataaatgtccattttgtatctatcattctgtgtctttatgtaatagtatctaatattctatatctgtatcaaatattctgtatgtacttcatattcattttatcttattttatttatttatttatttatttatttatttatttattttagacagagtcttactctgtcttccaggctggagtgcagtagcacaatcttggctcaccacaacctccacctcccgggttcaagcaattaccctgcctcagcctcctgagtagctggggttacaggcacacgctaccatgtccaggtaatttttgtatttttagtagagatgggttttgccatgttgaccaggctggtctcaaactcctgacctcaagtgatctgccccccttggcttcccaaagtgctggaattacagatatgagccaccacatccagccccattttaccttaatttgtaagaatatataattatatttataattttattcattttatattaatttttctatttcttaaaggctaaatctctagtttcctttttatttttcaggtagaggattttaattcactgagtacctgatcattttacatacctagtcaaataaatatgaaatttgaagaactaagattaagttttaaaaattcttaagtgcatacaatccattgaagaaaacaaaaattgcttaagcagtttttaaaaccttgataagaggtcatcaacatgatttaaatgtgaaattagctaatgtaagtagcagttagaatgagatttagcttatatatttggaggtataatggaaaactctggtgaggactcttttattgcacaccaagagaaacatgagaaagaaaaatgagttgcatttttctgcatttttccagaagtgaaatgctttgcaacatcctcagaaagaaagagaatacatgagtaatatgaaagaaaactatataaaggatttaattatttccaaattgcctgggtgtttttttagtgcctgctttttttttcaagcaggaataactgtagaaacttttatttatttatttttaaaggaatggttactattcttaggaaaagtggcagtaaatatagttaataacggtaattataattttataaactcattcaaaagtcttgattttaaaggcgatagtaaaaaaaatatatatctatttatcttgttccctgaaaaatggtagcactcctgaccactgagagactgttctcctcggcataattgatggccttcaaagccatcatacttcagtattcaatgtcaaagatttatttccatttgcaaaatttgcttagaactcacctatatttacctttcctcttatgacttataagataatattaacatctacataacagaatctcactcacagaatgtttgagccacgaaggtgctctgagaccctctgcctcaacagcctcattcatagatgagagaagcccagagaggtgaggacgccttccaaagctctagcacttgtttctagacatggaaccaggacagcccttggcatttcccaccacattttcctgcttattatgtggcatgagcttgtctttaacactgaattagaattattgcacattacattgcattcatcaaggcctacccttcaggcagtctgatgtaacagtctattataagacatccgagaaaaaccatccactatcctttcagatgttctcaaaacaatttgtattaagagctaataaaatgaaacagaaaatgccaggtaaactttttaaaataaagattttgtgattcattgggtttaattattggttttattttagcattactttgatacatttcatgaagtatacagacagaactaaagccacatttaaaaggcaattaataaaacccagacattatgatataatttacatacatttagatatatttaaagtgtacagttcatttatttagtataaccacagagttgtgcaaacatcaccaccatctaattctagaacatgttagaaccccaaaagaaacttcatattcattagcatgttgcattcctggcagctccctcttgccaccctgtaccctcagtcctaggcaaccactaaacaactttctgtcctcatagacttgtctattctagacatttcctataaatggcatcatacgatatgtggtattttgtgactggctctggcttctttcacttagtataatgctttcacatttatcatgtagcatttgtaagtgtctttcccttttatagctgagtaatattccattgtatgtgtattccacatctttatttatccattcatcacttgatgaatatttggatggttttcactttttggctactatgaacaatgctgccatgaacatttgtgaacaagttttagtgtggcattatgtttccatttcttttgggtacatatctagaaatagaattactgggtcatagggtgactctatgtttaatattttgaggaattcccagactgtttgcaaagtgactgcatcatcttacaatctcaccagtaagtatggcatgaggattccaatttcttcacagccttgtaaaaaggaaaattttacaattataattatttggcaaaaattcaatgaattttttgagcatctattttgtgaaaggtcttttttgaggtgctataattttttaacactatcaatttttgtggaaaaaattagaacttttctaaaggacattatttttaaagtttattacttattatttattaatttttattaatacataatattgctatgtatcaggtacatgtgatagtttgatacatgcatacagtatataatgatcaaatcagcatatttagaaaatccattacctcaagcatttatttctttgtgtttggaacatttcagaacttctctttcagctattttgaaatatgcaatatattttttgttaactatagacactctattgtgctattaaacactagaacttatttcttccacataactgtatgtttgtacccattaaccaatctgtcctcatccccccagccctttcccagcctctggtatctatcattctattccctacctccatgaggtcaactttttagctcccacatatgagtgggaacatgtgatacttgtttttctgtgcctggtttatttcactaaacataatgacttgcaattccatccctgttgccgcatatgatgagatttcatttttaatggctgaatagtattttgttgtgtatatataccatattttctttattcattcatctgttgatggacacttaggttgatttcataccttggctgttgtgaatagagcagcaataaatatgggggtacagttgtccctttgatttattgatttcctttcctttggacagagagacagtagtgggattgctgggtcagatggtagttctatttttagtttttaaagacactttcatactgttttccatagtcgttgtactaatctacattcccaacaatgcataaagagttcccttttctccacataatcaccagcatgtgttattttttgactttgataataaccattctaactggggtgagatggtatctcattgtggttttgatctgtattttcctgatgatccgtgatgttgagcagtttttcctaaacctgttagccatttgtctttttagaaatgtctattcatgtcctttgctcactttttagtgagattatttgattctttgctgtcgaattgttttgagttctatgtatattctggatattagtcccttgttggatgaatagttagcaattttttctccattgttcatgttatctcttcactctgttgattgtttcctttcctgcgcagaagctttttagtttaatgtcgttccatttgtctatttttgttttggttgcccctgcttttgagatcttagccataaaatctttgcctagatcaatatcttgaagcatttcctctatgttttcttttagtagttttatagtttcaggtcttgtatttaagtctttaatccattttgaattgatttttatacattgtgagagatagaggtctagtttcattcttctgcatgtgaatatccagttttcttagcacaatttattgaaaagaatgtcctttcctcagtgtatgttcctggcaactttgtcaaaaattggctggctgtaaatatgtgaatttatttctggattctctgttctgttccactggtctgtgtatctgtttttataccaatagcatagtgttttggttgctatagctttgtagtatattctgaaatgtgttagtgtgattgccttcagctttgttctttttgctgagtattgctgctatttgggctcttctatggttctatgtgaattctaggattgttttttctattgattcaaagaatgtcattagtatcttgataggaattgcattaaatctatagcttaccttgggtagtatagtcatttttaacaatattaattgttccaattcatgagcataatatgtctttctatttttggtatcctcttcaattttgttcatcagggtgtagtgttttttgttttgttttgttttggctttcatagaaatctttcacctccttggctaaatttatccctgagacttttttgaagttataaatgaggttgctttcttggtttctttttcagatagttggttattggtgtataaaaacacaaccgattttttatattgattttgtgtcttgtaacattactgaatttgtaaaatcatgtcatctgaagtagagacaatttggcttcttccttttttttttttttgaattggaatctctctctgtcatccaggctggagtgctctggtgtgatcttgactcactgcatcctctatttcccaggctcaagtgatcctcccacctcagcctcctgagtagttgggactacaggtgtgtgccaccacacctggctaatttttgtatttttcatagagacagggtttcatcatgttgtctagtctggatttgaactcctgggttcaagcaatctgcccacctcagcctcccgaagtgctgggattacaggcttgagccaccacaactggctggcatcctgttttccagtttggatgcctttcatttctttctctttccggaaagagaaagtctggctaggacttccagtataatgccgaataagagtgcttagagtaggtgtccttgtcttattctagttcttagaggaaaggctttcagttattccccattcagtatgatgttagctgtgggctcgtcatatatggcctttattatgtcaaggtatgttcctgctatacctaatttgttgagagtgttcatcatgaagggcagggtgaaagggattcttttctgaaggaggttgtgtcactcagtgtctgatgaggatatagaagtcagtgtttggtgagagatagtaatttgaagagggaacatttactataaagaattattaactggcaaaatgtgataaactacaaaaggggtaaattgtatgctaaataacacagaaatagcaaacatagggaagagctgctacttctaggactgagggaggatacccaagaaaagaacaaacatggaagggtctttcacacctnaaggctgagattcagaccttgttggagagggtggtgctgtggcccgcaggatagaaaagttctttgaggtgccacaggccaggcctggtgagtagggtactggctgttgggtgccagtggatcagcactgtggtcaaaaaagtgccttctagggtgctggaaaaacccactggaaggtggtcaccattgggtctcctgcatactgctggcaaggaaattgcctgctcgggtgacaataaaactcagtaggaagccctcactaggtgctggtggaactcactgtagggtgactctcccatacaccactggtggcggccacaggtaacaagaaccaggaagaatcaagaaggaatgctcctttatttgctataccttgttttattttattttatttatttatttttttgagacagagttttgccttttttccctggctggagtgcaatgatgcgatcttggctcactgcaacctccacctcccaggttcaagtgattctcctgcctcagcctcccgagtagctgggattacaggtgcgtgctaattttgtattttcagtagagatggggttttaccatgttgtccaggctggtctcaaactcctggcctcaggtgatcctcctgcctctgcctcccaaagggctgtgattacaggcatgagacaccgcatctgacccctttactataccttgtagtgtctcccctacactctaccagcaacagatgacattgcactggctgaccgaggagccagattagtatcgtggaacagggcaaagaagggtggatttggagcggagaggcaatatattgataactgtcttggtgaactcctttggcttcttagcttccacatgcaccattttatatatatatttgaactctgtataacacaaagtcaactctgttcttcagagaaatgcagagttctcacccctttccccaaatgaggagacacacagttccaacagttatcgtagtctcatctggctgtcttaaatactcctcaaatcaaagtcccactgaatattctcttacctaaaggctaaattgtagagtttatattcaacaactttcataaaataatgaagagagaaaaaggaaaatggttaatatatacaaatacacacatatacatcacatgcaaagaggaaatacacaaaactgtcagaattctcagttttgtaattgattgagaggccatagttggtatctatggcttccttcttctactgcctattctgtatttccattgcccttaaatggtcaaggttctttatctggggagtgatccaaactttcatttctcaacagcctgaatcctcaataatcctgccccctccttttgactcctgcggtttcccattaacctttatttcacaccttgagtccaggttccagggagttagctaatattggagatgacgcatctggtcgtaggcaggtgtctggtgagatggctgtttttccctttggtcctggtccttggacctcatacattgctgttgagccattgcttgtttctgtctacatggcatatttacctcaggaggctctttccactatcttcatgtgatacttgagggagctgcatcatcacagtttcttgcttctccaaaacgctggggtggagggggaagggcagtggggtgggggaagagggatccagaatccctgcacggactcctctggctggatgccagatgcagccactctcttccccatctctgtgctccttttctgggtggtggtagggtgaggtgggaaattactttcttgttggtcttggatactttgcaaagacatcagtacattttgttagctttaaaggtttagttcttagcactttgccatcctgggaaatcaatgccagcaaatcccatagaacttgtctgctttttgcttcaatttacccgtccctgaagacaataaacaaagagatggcattctgcttataaaagggtagtatagtaaaaaatgaagaaaatatatctcacaactcatttcccatcttttaataaatagtgatagacttaaaatagctaagattgaaaatgatgcctatttgaaaatttactaagtaattacattctagcagttatacatgagatatttattatatatcacatgtactataaatctaattatctgtggtataaatagacattcctaatcacttccttttaagcattttctcttgaactttcgacatttgaattggattcagaacacggaacaagcacaactcttaaaagtgtcagacatgctagatttctttctcgctcccatggaaaaagtaaacacagcataaaacactcatcaatttttagaagttaagaatgtgctttatgtagtttatcctagaaaaatcctcaagttatataaacttttagattatgaatgagttatggtcatttggagatggcaacagagcaactggcaggttcaagaatttatacacaaaggtgaaaggctttttgaaacaatcagagttttctttcaagtctaacttcctgagtaatttatctgagaaattgtgagatgacatgcaggaggactttcaaaatcatcccagtgtccctcaatcaatctggttcaaatatgcagaattggaggacaggtcaagaaagcagacgctgaaacaggaggaaatgaagtcggcttattgtgaacatgactttttcccatctaaaaaaagatgatagtttacattgttttgagaattgtggagtgggagaagcagaccaacctttcatactgctgaaatataattttcctggccacacatcttcctcattaattgtctccaattccttacaaaagaaaaaaaaaaccttcctacatttttttctattataaaataatttcatagttgtatttaccaaatgtttaagcatgaatgtggtaactggtgaaaacagcttaatctgtggtggcatgaaatgatgaaaaaataaatatattttctcttttttttttctgtttttattctccatccacatcaactgaagggtagctagatggttttgtgcagaagtctgagtgtcccttgtgccaggagatgcttttgttacctagatctgtgcttctggagctacttcactggattgatgtttagggaggactagaaagttgaaggggagaagttgaatcatggaggatgttggagtgctaagatccctgaatgtggtacctgtagataaatacagtgactttgagacgcagagcaaagactccagtggagtctgttattcagtgagcaacagcgtcacccaccatggaataaatcaggttggggtggacaatgtatttcaaggttctgtgattaaagattgtgggacacaccagcggcccttccataaatagatttcacaagcctcagccttcttatgttggtgggtggggtagatggtggccagagaatgactgagattgggttttctgtcaactcgaatgggagaggctccttcagttggaattagatatgtaaaaggtaaagaaatgtgttatttcatgtacctgtggattgtgaaacaaattcatgctcactacatttgtttcaaaagcataaataggccctgccttctgcctttatctactctacacgtatagtatggaacagtatgattaagccagtatgatttgagccagaagattaagttccataaaaagtgaagaaaagtcaacaatttaacacaagaaatgtttaccgactaactattctatgccaggtctgggagtatgaggaaataaatgtgacatatcccttgagaaagcagaaataatccaaagaattcatacatatacaaattattaattacatcagtaaaaatctttatgatgggtgtggccaggtctggggctggaaggcccacctcagcattgcaaaagaattagtcttcagtcctgaagctcacagaatttgctaacctattacttagggggaatatacccctgaatatcattacttgaagaaaaaatacacatttcctttggaagaaagtaaaatcagaaatcttgagggttctctcgaagaaaatcagacctgtagttctaaccagtcaactgaccttagttgagaatgttaatgtgccagagaaacaaatgaatgctcacctttccgaggaagacagtagaaaataacccgcttgactatcttcagctggaaaaaagaactctttttttttttttttctgtgacggagtttcactcttgttgcccagcctggagtgcaatggcacaatctcagctcactgcaacctctgcctcccgggttcaggcaattctcctgcctcagcctcccgagtggctgggattacaggcgtgcaccaccacgcccggctaatttttgcatttttcagtagagacaggctttcaccatgttagtcaggctggtctcgaactcctgacctcagatgatccacccaccgcagcctcccaaaatgctgggattacaggcgtgagccaccgtgcccattcgaaaaaagaactctttaatccactatacctaaccttttactctctcctttagatttaaatgattaacttctgataatgctgcagacatttttttttctgaaagatttgttaatgaatggattccttttgaaagaagtccaggcaagagcacagaaaaacagagagttccaatgatgaccaactgtgaaacatactatgctatataagaatcctctagagatgtaactgtaacaccaagatcaaagcacaggggactgtatcaatgcatttccctgcagaagataggactctataaagtgaagggcaagtagcatgtggaagaggaaggacactgggaagagccctaactgctgacgggagagcctagtccagctctggtccttcactggtcactgtgagatcttaggcaaatcacttgcttttctgggccttcattttctcatctggaactgaggtaatcgaattagacccttctttaagtcctaagattccaaaatctccaatgcaggcacatattaatattgtaccaggtagcctttgtcctacattgaattgtaggtatagtttgtgcatatttgtctcccatccaaaagtctgcagattcactaaggaagtcagttaagggccaatcgggggatttgaaggattcagagctacaggagctattctttattcctgggtaactctaagccagaagatggagaagctcacctaaaagctctgccatcaggtgtgtgggtggtgttgtactatggtgtggagagaggagaatgtctcaggagaccaggtaagggttcctatgattgcagaaccaaccaaagagccttggaggcaccaatgatgatgattttctctagttcttcaaaagccaggaactgggccatattgttttctttgaaagaaaagaaaaataagtgaaaatgcttcacagaatattttatagcaacacacttctctggattaattaatagttttagaagatggaggtaaagagctcatctgtataaaggtctgaagatgcacatatcatcttggaaaaaaagaggctgttattccatcatttccacatacacggttttgttacaaatataattgaaaattcaagtctttcaaaaatagaatacatgggtactggagattaggtcacacataatcaaattctaaatttcttttccagcaaagtcgtccctactgaggtcagagtacaaagaagaggggatggtaggctaaacgccaaatgaatgaaaagggaagatttttcaggcagggagtcattagtcttgtcacatgctgctgatatgaaaggactgaccactggattgagcaacatgaaggcatgtgacctcaatacaagctttttctgtggttggaatgagataaaagagaacagggagagaagtggagtcaccaagtgaggacaactctttgaaggaggtttgtggaccatttgttgttatacagagggaaatgcacaggggattttatgatgagggaacagctctgtttaagaactgggtgtaattgcttttgagtccacagagagtcaaggttctctgtgatttaattattcaggaaagaggcttcctagaaagtttacactttcttcaaagaaagtcagtttctctcatttgcatgtctctcatttctaagtgacttaatgaaaattcctttccccactaacttgagttttatataccttgtatggagtagacataagaagtgctggttggcctgntttggtgcaggacaggatcccacaaaaagaaatttcagccttntaacctttcttcctttgactttctgtgattagtttccttagtgtctggtaacagctctggttcctttgctgtagtgtggtgagcctcatctcttcaaacaaattggttcacaggctgggggatggtgggcgggagggatgaaatcattgttttgcttcaatgtcggttctcccctgagaggtctttcacagcaagggagtctgtatttttagaattagcatgttctgtttcaatgttgtgaacattcattttaaacctactatatttagcagaggtttaattacccaaattgggaaactagttttaaaccgtcaccttctacttggttaatcaaaacagtccctaccaccagcaggggagactggcaatttcagtcatacagccacacctggtgagggcaactgacaaaagcaattccattgcctgagttcagcatcttcagcacccatccagccctgttgtagcccctctttctttcagtaagactttcctgcaatataccctctgtggactagggctggggggatgtgtctgctctgatgtctgtggggagtgtcttttcttcccacacaaaaatcgtgattatattttccaaaatagcactcaggaaacaatctctctgtggcatttacagatatgtgagatgttgaggaactgcggtctgaatgatgaaatttcttggatttttcagcaatgtcattttttccttcatttactcactcacttctggaagggccagtctgagagctgggctgaggagtccaaggctgatgcagtcatggatgagtctgaggcagggagaccactagcaggagaatgggcagtgccaactggctttaaaaatactcagatacaaatatgaattttgcacatccatttagtcatttggcaaatatttattgattggttgtgggataagccatagagcctgacactagtttagtgagagagatacacaggaataggaaaaaaattatcataataaatgcacagctacagagcgagagctctgaaggatcattttatgagtatgcgtaacaggaacctgatgtgattgatcagtgaagcaaattggtgcttgaactgagatccacagtggtgcttcccaaattttatgtgcatatgaatatctggggatcttgttaaatgcagattcctgtgctgcttctggggcttggggaggagcctaaaattctgcatctctaataagctgccatgtgatgctgatgctgctggtaccaaagattctaaaggacaaacataacggaaagcaggggttgggggaaataagtttcacagggagggaacagttatacacagcaagaacatagtctgcatggtgctcttctggtccctaaccactgaagcaaaggtcaagtaattgttctaccttcttccatgactaattggcaggatatatgttcccctgataggacatttcccaactttaaggctgctctttatgtttacttcaaaattccttttacctcttgtaaatattgggatttccatttaaaaggtcagacaaaagatatgtcttctacccttctccttagaatttgccagaaaacagggacagaaatatgaatttcatatttgataaaccttgaagactaactcccaaaagataatatttggagaggctctcaatgcagtgaagatcaaatatgggtgcacaaaggctcctggagggagtgcttgggaacacaggtctcagataaagctggcaggaaactgttttcttaagtagatggcactttgagggcaaaaccaaccaccccttcttcggaatcacaggaaaggcaggtacatggagggtagggttggagcatccctttaccgcatttgacctcacaggaaagtggagcaagcagaactgcagaaaatgtgcagaaatgctgcaatcagtctgtgtcctagtgaggcagggtggaggagagaggctgaattgcctcctgctctgtagctgccaatgcctgttggctggagagaggtaaaaattcaaacaacccgcacatatagtcttgtcatcatgagtttgtccctgaaccagggagaattcttgctagcctggaactgctcatccccttctcaacaagaccctggatcacttccaacatcaggaagaacacacttcatttaaagatgagtaacaaaaaggcaactagcacaggatctatacaaataanttacaagacaaaaggaggaagaggacaggggaacataaagaatcctcaccaataacaagttgccattaagtagaaaattatgacaaaataaatgtctatgaacaatgaatttaatgaaacaatgaagaggctggaagcagagcaattgagagatcaggggaaatactagcaccaccacaggaggaaatgaaacaagaacttctgaaggtcaggaaggaagcagaagagaaaaataaagctaccatggaaatgcaagcatactgtaataaacactaagaagaaacactgctgacatcacagtgaggaataggagggcaacattaagacacataaacaaaagatataagcaaaataaccagaaatgaacaaagttagagtgaactagagagaacatgaaagatacagaaaacaaaagaattgcaacatatgcattatttgtatcttttaagaagaagtctggagatattactcagtaaaactctttagaaataaaataagacttgaatctacaaatggaaagggcatactgtagctcagaaaaaattgatacagaatgatcaacattgagaggtatccaagtaaacatactggccctcaaggccaatgaaaaattttagaatccaggcaaaaataaaaaataagagtgaaaaattaagttggcatgataacaaaatagactatgtagtggaatatcaaaagtaagagaaaggaatcctaacataaatgagagtacaacatttcaacatattaccataaaaagtttaaattgtctaattcacctattgactcaaatttacaaaaaagggaaatcaaattatttgtaatatgtgagatgcatctaaaacaacgaaactcagaaaggataataaagataaaaattaggcaaagacatgcaaagcaaatgcaaaaaaaaaaaagagcagctgtcataactatggttgcattcaaaacaaaaaacatgaaataagacaaaaggggaacttgataataataaaggatgtaactcacaatgcagttcaatatgataaataaattggcatggaaaacatggtgtcaaagctacagaaaataggaataggcagaaatcctttagcagtagaaaactttaacgcttatcttttaactatggagaaatcatatggaaaaaaagcaaggatagttttaatagctttacaacaaactatatactatgaagacagattacactttcctttcaagtattaatggagcagttacaaaaattaactacatatgaagccacaaagaaaactgcaatgcagtcgatcacatagaaatagtacagacattatgtcatgccaacgcaaaacttcaaatgttaaagagagaaaaaaaaataactttacctcctggaaattaaagaacactctctatataatttttcagtctcatagagaaagtcatcgctaaaaatgcagaatatttggaaagcaacacgaattaaaacactatattagagactatgagatcttgttacagcagtacttagaggaaagttcataactttaaatacttgtaacaaataagaattaaatgaattaagcatccaatatcagaatgtattaagtaaaataaagacaaggcagaatagaaattagtaaagataaaaacagaaattaattaatttggaaaatttaaaaaatgccaaaataaagtctatgagttgtgtttgaaaaatttttaagtaaaaatgtgtgctatgctctttttttgaaatgataactttttaattgtggttaaaaatataaacctaaatttgctattttagctatttaaaaatatacaaatcaatggcattaattatatgcaaatgttgtacaatcatcaccagtactgatttctgaactttttcatcaccccagcaactctgtgtcctctaagcagtaactccccattctccctaccccctagcccctggtaaccttcagtctacattttgtgtctatgaagcctattctagatgtttcatataagtggaataatataatatttgtcattttttgtttggcttatttcacttagcatgtatcagaacttcattcctttttatgtatgaataatattctgttgtacataacataccacattctgtttatacaattgattttgttatgtgctcttggatggttctaccttttagctattgtgaataatggtgcaacacccatcttttttttaaagggaaaaagcagaaatagatgatataagaaaacaagaattgagaaataattatagatagagaaaattaaaggagattataggacttatatgtaccataagcaaataaatgtaaaaacctggataaaatatgtaatttctagaaacgataaagttctaaggctggccccagaagagttcgaaaatctaaagagaccaattacaatagaaaaaacaggaaagtcaggctatccgtcttccaaactaccaggcacagatatttttacaggtgagctcttcataaccttaatgactcaatcactctaaagcttttaaaattcttctagaagaaaagactctagttactttttataaagtggaggttacactggtgtcagtatgccacagaacaacaaaaataataaaaagaaagtctaatgtctcttgtgactatcaatacaaacatcttcaatagaatactagcaaacatattccaggaggacagtagaatgtccttcctttcaggaaaggaaggatagtttaatattaggaaatctattgatattgtttaacatcctagtatatgtaaaaaacagtaaaaccatatgcccgcactcatggttgctgaaaatgtttgctataaaattaaaatccattattgattatgaaaaaacacctcatcaaatagaactaaatttatcacattagtaaaatatatttgtcttacctcaaaagccaggtcatgtttaactagcaaaccatacactcacattaaattgggacaaagatgccattaccacaacattattgaacattggtcttgaggtgctaacaaacttttagataagataaagaagagtggtatgtacaagttggaaaggaggaggtaagataatcatatttgcaaataatgtaactctgtgccttgaaaacccaagaaaattaactgaaagatcactgccaacaatagtaaaagaaaaaaaaaataagagaattgagtagtgtggctagaatagtctttacacacataaacaacaattggtgctaagatatgcaagaaaggactgtatgcccagagaagctaattctacagattatatggaaaaatgaaaaaagcaagaatagctaggaaacatcttgaatcagaatagtaatgagaagcatgaatgctctgatgaacacatattatagagttataatcgttacagcactatggtagtggtgcacagatagctacatcaatggaacagaggagaaaattcatttttttttgcagatcacagtaaaaaatagcttgaaaaaccactttcctatgtatgtcatatgtaaattttacataaaaatacatgcacgtatatacttgcatatacatagaacagctttggaagtatattcaagaaatgtaacagttgttgggtgatggggtaggaagtagtgttatgtttcactatattttttgtgtacctttgaattttgcactatttgtggtattatttctttaaaaaggcaatttattttattatttttttcaaacccagcacagaatattaacaaagtagataatacataggatggatatggaatgatttgcttggatcactccaagcaaggcatctgaactattcacatggttgtgtttggaagctcccagggtctaaacactgtaagatttcggagatttataccagatcagactcacaaacatttgattttcctcatttttcaagattttttcccctctggcctttcatttattcatttagtcttcagtagagagaccaggggatggcttggatttaggggcttaaccacctccatcttcatcagctccattcagctgaagctgttgctgttcttctgaaaagatcccaggagcttcccaatacatatgcaatctctgtaaaagcagtgtgtttgcaaacacagctgcaagaaaagcctcctacagcaagtatataaaaaggtgctcaatatcactaatcaggcagatgcaaatcaaaaccacagtattacctcacacctgtgagaatgactattataaaaaacacaagagataacaagtgttagccagaatatgcataaaagggaaccttgtatactgttggtgggaatacagaggccattgtggaaaataatatggaggttctacaaaaaattaaaaataaaattcttatatgagccagcaatcctgtttcttagtgtagatccaaagaaaatgaaatcacctcatagagatatctgtgcccccatgtttcaaagcattattcacaatagccaagatatggaaacaacctttggctgtcaatagatgaatggataaagaaattgtgtgtgtgtgtgtgtgtgtgtgtgtgtgtgtacacacatacacaatggaatattattcagtcttaaaaaaggacatcctgccatttgtgtcaacatgaatggaccaagaggaaaattataatatgtgaaataagccagacacagaaagaaaaatactacatggtctcacttatatgcgaaattaaaaaaaaaaagaaacaaaattcaaagatgtagaaacagagtaaaaaggtggttaccaggggtaggaaaagtgggggagtggggagatggaggtcaaagggtataaagtttcatttatgtagaataaataagcctagagatctaatgtatagcatgaagactgtagttaataatattttatttcataagggaatttgctaacagagtggattttaggtaattctactacacacacacacacgcacacagaaaaggtaactgtgtaacatgatagatatgctaatttgcttgatgtggtaatcatgtcattatgcatattgttaaataaaatttatggaagctctcattctagatcccaacaaaccaaagcaaaatggagtcccacacgctaagtgccacatgattaaactgaaattttaagaaagcaggtaaatttccaaacagaccagatatttttgaaaacagaagattcacagaaaccaattagaaagggcccagtcagcctaagtcagtataataaggaaatctccacagttttaacccttataagaaaagtaacctgaagtaatctgatgttaaccgatctgcctttttctattattctgtttccttgttcccactttacaaaaaccaattgttctgccatgcccagtggagcattcattctatttatagaatacaatactgctgaattctagaatcacaaatagaagccaattagatcttaaaactaaatttgttatagttttgccttttgacaatatgtatatcaaaacatcgtgttaggtattgtcttagtctgttttctgttgctataacagaataccacaaacggcaatttatacagaaagaagtttatttggcttacagttctggaggctgggaagtccgagagcatggtgccaccatctggtgagggtccttcatagtgaaagggtggaaggtggaagtgaacactagaaacagagagcaaatggaggctgaacttatccttttatcaggaacccactcatggggctctgccctcgtgatctaatcacctcttaaagggcccacctcccaataccattacattagcaattaaatttccacatgagttttgaagggggcattcaaatcatatcaagaaaaaaaaaagtcaagtcccctaggcttctcttctaggtagattcctgcttcagtcccttcctatatagaaactctggagtttcccctacctcatactattgcctgttttccatggctccaagagaaaaggaatattctcttttcttctgaaaaagcactacagtttattggtcagcaccaagtgtgtttaacttcagtttcagatggcaactcacacatagatgtgtttatgttgccctttatcagtattatcattggcaaagcctttggtaagcaacagaagtggctaaacagaataattccaggcttgaagttcctttttcatctggttccctctgggaaaaggctatgaaagctaagggtggtggccaagtcccaaaggccaaggtcaccatcaaacattttctgagaatctaccaaaaacacaggtctgtattaggtcaatatgcacacagttgtgctgggaaggaatgaagctttcaaatatgagaactgtacctgaaaaatctttgccatcagttctttgaaatgaaactctaagctgggaagaactctctgcttaggggaagtaggactaaaacttgacttttgatttggagaacattcaaaagactctaagctcatgagtgctcaacttgtaattttttgcccttgaaaaaactataggcgggtgcagttacacctgtaatcccagcactttgggaggccaaggtgggtggatcacttgagcccaggaattcaagatcagcctgggcaacatggcgaaaccccgtctccactaaaaatacaaaaattagccaggtgtggtgatgcattcctgcatgccagctactcgggaggctcaggtgaggggattgattgaggctgggagattgaggctacagtgatccgtgatggcaccactgtactccaacctggacaacacaaagaccctatctcagaaacaacaacaacaacaaagaagcaacaaaagggaatttgtacttttagccatagagccttcaagtttgttataaccactggggagaaaacccttcatttctacttcattcctaaaatgggttaatcactgattatacatagaaaatttactcaaatgaaaacaaaccaccaccagattttacctttaaatatattttcttggtattattttaggttctggtagcaaaaggtgcagagataaggacatgggttaatgacatgggttatttattgcactctgcatacagcagcaagaatgcttttcctaaaaattctttttgctgaagtcccttttttgcttatgtctcttttcctaaaaaatctttttgcttaagtccctttgttgctgcccacatcatttgatttcccacagcaaattattataagcctgcattatcctgtttctcctcctcctctgaatcttcctctccatcagcacgatttctgttttctttctttgccaactagctgtgtggctaagagtaagtcactggagtctcactgtccctttgtctgtaaaactatggttttggaataagaagggtcctggcctgctatggggtgtatcagagtcagggtgaaagggtcttaaggtatttgaaaataaagcagcagataagcttgacatggagagtagcctacctctggctctgttttctccatttccttaggagtgaaaagctggccgtcagcaagcagattcagtgctcacattgtagccacataatcaaaggaagaaatacatatctttttttttttgagatggagtctcacactgtcacccaggctggagtgcaatggcacaatctcggcttattgcaagctccgcctcctgggttcatgctattctcctgcctcagcctcccgagtagccaggactacaggcgcctgcccccactccgggctaattttttttttttttttttgtatttttactagaggcggggtttcaccgtgttagccaggatggtctcaatctcctgacctcgtgatctgcccgcctcagcctcccaaagtgctgggattacaggcgtgagccaccatgcctggctgaaatacgtatcttttaagatctaaagaaaatcgttttaaagttactgttgtgtccatcttgttttcttgttactgaacttatttcaaaaatttaaataacattaaaggaaggtataagatttttatggctatccaaaagctgcattaaaaaaaaagtaacttaaggatttccaagtcaatttccggctgtgaaaatcacactgtgtcctgagttggtgggttcttggtcttactgatttcaagaatgaagccgcagaccctctcagtgaatgttacagttcttaaagccagcgtgtctggagtttgttccttctgatgtttggatgtgttcggagtttctttcttctggtgggttcacggtctcgctggctcaggaatgaagctgcaaaccttcgcagtgagtgttacagctcttaaggccacatgtcgggagttgttcgttcctcccggcgggttcgcggttttgctagcttcaggggtgaagctgcagaccttcatngtgagtgttacagctcataaaggcagtgtggacccaaagagtgagcaacaacaagatttattgcaaagagtgaaagaacaaagctaccacagcatgaaagggaacctcagcaggttcccactgctggcttgggcagcctgcttttattctcttatctggccccacccacgtcctgctgattggtccattttaaagagagccgattggtctgttttacagagagctgattggtctgttttgacagggtgctgattggtgcgtttacaatccccgagctagacacaaaagttctctacctccccaccagattagctagataacagcatccattggtgtatttacaaaccctgagctagacacagagtgctgattggtatgtttacaaaccttgagctagatacagagtgctgattggtgtatttacaatcccttagctagacataaagattctccaagtacccaccagactcaggagcccagctggcttcacccagtggatcccgcacgggggccgcaggtggagctgcctgccagtcctgcgctgtgtgcccgcacacctcagcctttgggcggtcgatgggactgggcgccatgtagcagggagtggcgctcctcgtggaggctccggcgcgcaggagcccatggcaggggcgggcgggcgggggtgggaggaggggaggctcaggcatggcaggctgcaggtcccgagccctgccctgcggggaggcagctaaggcctggtgagaaattgagcacagcagctgctggcccaggtgctaaacccctcacttcctgggccttgtgggcagagcctgctgagcccacgcccacccagaactcatgcccagcccagaactcgggcccacccagaacaagcgccgtgcccagccctggttcccgccagcgcctctccctccacacctccctgcaagctgagggagctggctccgaccttggccagcccagaaaggggctcccacagtgcagtggcgggctgaagggctcctcaagcacggccagagtgggcgccaaggccgaggaggcaccgagagtgagcgagggctgcaagggctgccagcacgctgtcacctctcaatacgatctgtgaacatgtgccctttctcagttcagaaagccatttagagcaaatgtacttatttactttatccaggctctgcttactcctctcctctccacagccatctcctccattagaaatgcttttccctgccatttttgacagaccctgagcctcctggcctccctgcctgagacgcattatagtctctctgacctggaccactgcatgcagcttgggagcctccctgtctttaaggtatcggacaaaatatagatgagagtagcaaggcattaggagtagtagtaatagcagtacaaacaagaataataatttttatgataatagtagctaacatttgttgaactccttttatgtgccaagcattttatgtttattatcttaccacccttgacaaggaccttatgaggtgggtactatcaacccagtttctcagaaggggaaactgaggcttataaagaatatacaacttgctccaagtggtaactagtggagagaggatttaaaccttggctcttcaacatcccataacctatgcatttagttgctgttcataaatagtcacctgcatatgttcatcttgcttttacctgtgttcatcccatcttttttgtgaaactcctggaaggcaggtcgtgtcttctttcattcttttataccatctcagagggctgtaacaatacatgctcagaaaacatttctgttcaacctgcatgaagtacaaggcaggctgaaatgtaaagaaatacataaattacactgaggaagagcaaatcctttcatataactttttcctggcattacctcttaggggaaaagaattctcaagcaagctgtaactgagctggttaccaaaatcagaatgaattctccccaatcacgggggacattccataagcctttggagtgaggtctattttaaggattttgttcaagttcctccttcttgtttcctggccacactgcccagcacttcaattggctaatagggattctgaataagaaagatacaggcagctcacttggaagttacgttaaggactaataaagatcttggagtgattttcaacaagataagatcagcatcctggtattgagttattttgctacattaattaatttcagtttgttctaatggtctttggcctcctgcttaaatgtcaattgaggcaacagattaattccccttaaatagtggcctgtcatgtcttgttacttagttctgggttttataaagtaagaactaagatggatatttatcaatcgagcagatttctgtgttgtgtcctctaaagcccttggggtcagtgtctcactgtagcatcactaacaccttttatggaatcaagtgattaataaatgtgtcctcatgagactgtgatgcttctgggtgttcattttagataccttaataattagtctcaagagtagctcagttattaagtgattttggggttgcatcatgtcagggaaacaatcaagaagaaactattttaatagcataaatttctctgagatagtgaagataaaagaatgctaccagtttacccactccttactgtctgagtcaggaagaaggtggaacatcctattccttcttcacctctattacctcatttagaaaattttgactatttcttcttttagctccctttttacggtccaccatttttggaagatgactttctccctgtcttcttagaataaaaggtccaaaggaagaaaagaacaagatatgctcaggagttacctgtgatgacttcctctcccttgcctcgggcactggcccaccactcctttttctattctcagttctttatctatttacttttctattccctgctcctttcctattgtcctgacttgcatgacactggcaagctacaaaatgggaacaatagcaactgccttagaaggctgacaggattcacgggaagcaccctgagcagagtctaattcctaatgagtggtccttacatattaggatcattttctttccttttgagcttctggtttcttggcctctggccttagcctctttcaacatattctacataggtaatcagattcaccttcaaacaatgctgttttgatcttgtcatctggtgaagaaaaaataaaaccttcagtggctttctaagacgatgaaatcaaattcaaagtctcatcgtggtattcaaggtcttctgtaatctcccctcagcctgtggctcttactgatgccccattcttctattgctcagggtgctttgggctgtagccactaggttgacgagcatcctcttgacgagcatcctgatgatgctgataaaagtgctcaaggacattttgggaattttttctttagtgttatctaggatagtactgtatacaatgcatatttttatgtataaatcttatttctgtctatgttagttgccttgaaacaaaaactgggcctttgtatctgtgcaggctacaaaggcttgacactgctacccttagaaaggcctgcttgccaggttagcctttggttggtaactgggaactgagcccttggagggctctcagtcaacagtcaattgataagtgtggttcactgtgcctagacttttgtgcaaacaacacagtttatgcttgaacacctgctcccctgtttggagtctggaatattttgatgtgctaggcagagggtgcctatgtgatcagctccatgaaaaaccttgggcaccgagtttctaaaaagaagcttctgtgggctgaaacgtcatatacaagttgctacattttccttgctgtactctatgtgatctcccgtggtaggcagaagcataaggaaatctgcacgtaaaatcattcagacnctgcctgtggctctcccttatgatctggctgtgtatccttattacatcactagaataaatcttagctttaagtactgccatacactgagtcccatgggtccttctagtgatgtccaaatgtagggggcaggggtcttgggtacccctgacacagtatctctttcaaaacaaattcttagagtaggttcttaataaatattttgtgattgagcatctcaaatctcccaaacattgtagatgcttaaaacatttaaacacttttgtttctttttaccatttttgattttttgggcacctttaagtttttttttatatgccatcaggccaacatttataacatatggtagatctgagatgttgttttactgcctacaaagaattgttctagttttgcctatttattttcttttacttcccgatatttcagacactgttagatcttgccagagcagttcttttgggcttttgtgatacagaatcactggaaaaggtagagggttagaagggcacaggtttgaggactaggtctgggagatcagttttggtgggagggtatgaaggagagaggcgcatgacagggcttgtgtgatgtgacgtgaccacatgaaaggaaggggctttgtgaattgttgcggcagactgagattccttttcacagcatttgagaaataacagaaagagaatttgttattttgaaatgacttcctggcggctgagttgttttcatttgataacgacccctctctaataccaagtcatggtttgcagtttacgtcttagggttttcacagattttatttgatggtaggaaccacatcatttgttctagatttagcatgtgaaattcccagtaaattcttggtgacaatgactgattgcttcattcataaacatttattgaatacttgctgtgtgccaagcatcgtgtgtagaggatacagagatgagcaaaaataggtccctactcacatcatagaggggaggccgactcacatgcacacatttccaatcagatatggtgaatactagtggtggaaggttaggagcccagaggacagcatctcatccactgggaccttgcttcctacgaggcttgtcctgcatttcatggccttaaatttcaccaatgtagttatctagtggtgctgataaatcacttataattagttttttattgtctaagtatcaattttagctgctgtttttttaacctttctttagtttctgcctacataatttccttagaattaaagcatcaataatggacctttgcaaaaataagcactttctaacaccaatgtgccatccatcagcaaaggaggccattagcaaagtccaattcatagactgcctctgattttgcattttaaacttgctaatatttagctcacagtgtgattttcccacggtcacacacctagttggtggtgaattgccgtaattttgcaattcatattattttgcatgtatctcattttatttgtattctgtgccaatctctctgatattgaatgtaagtttattgagtgcagatgtctgtgtttttatttttgtgtccctagtgcccaacatatngtctagggaggaaaatacttgttagataaacaattagatgatctattaggattctgtagagaaacaaaaccaataggaaatatatagatacataagaggagatatattgtggaaattggctcatgcaattatggaggttgaaaagtctcacaatatgtcatcttgaagctggagaaccaggaaagccagtggtataattcagtctgagtccaaaggtctgagaaccaggggagccaatggcataacttccagtctgatgccaaaaggcctgagaaacttcaggggagaatctgaagtcccaagaactagnaactccaatgtcagagcaggagaagatggatgtcccagctcaaggaaagagagttcaccttcttctgccttattgttgtatctaaactgtcaataaattggatgatgctggctcacatttgtgagggcagattttctttatttagtctactgattcaaatgctaatttcccccagaaacaccctgagagacacatccagaaataatattttaccagctatctgagcatccctaagcccaaccaagttgacacataaaattaataatcactgatgatagtaatgaaaagaaaaaacttggatttctgctttttggtcttcatgagatattttcctcactgtatctctcttcatgagatattttncactatatcacatggatatattttccacttcgatatagtagaaaatatgcatggaaaaatgcatctattatttattgagcacatattatacttgaggcactctgctaggcactgtattgaacaaagatgattaagacagtgtacctttcctaaggcacagaaaccataagataaatatacaaatgactgtagtgcaaggtagaatatacaaatgcacaactaagcaaatctgagaatggggctttcacacattgtgggagaatgagagaaagcttcatggaggaggtaacttttgacctaaaccttggagcaggagcacctgagttccagaggttaattaaaaaaatgaaggcagagggagagagggcagggtgggcaaagggaaaaacaggaaatataaatgtgagtcatttttggaaaactgtgggaagtctcttttaggtgtggtgtatgaagtgtgtgtatgttgggggaatagagcaaagtaaggattaaaagtcaggtttccaggctatgttgcctggccaagctcagggctttgcacttggttcatcagcattgatatgttttttgttttgttttgtttttttgacagcgtctcgctccgtcaccagtctggagtgcagtagtgcaatctcggctcactgcaacctctgcctccgggttcaagcaattctcctgcctcagcctgccaagtagctgggactacaggtgtgtgccaccccgcccagctaatttttgtatttttagtagaggctgggcttcaccacgttggccaggatggtctcgatctcttgaccttgtgatccgcccgcctcggcctcccaaagtgctgggattacaggcgtgagccaccgctcccggcagcacttatgggttttaaatatgagagtgacaacatcaggttattgggcagcaggaggtgggccagttttgaaaggcaggtgaatgaggcagtgagataagttgggaggggctgcaatagttcagaaacaaggtagtgtgcaagtaaatcacaggtggcaccagagatgaagaggaagaggcagtgtgacagctctgttgcatgacacaacatgggaaacgcaggattgagaagagccagaggtgatgatgccattagcagcgtgcatttagtacttatcacaacctatttacattttctatataaacattgatctcattagactgtgatctcctagaggaacaagtcccatgtcattctcattgacaaaatgaacatggcagatacttggtaaatgtttgctagtaagtgaatggaagtcaggcgagttggcttggtgatggcagctggggtgttgatggaaataccgtgcttctttttggacatgatggaatttggggatgtggtctatttgttagatgcagtttctaggaagagattacccaaagaactgaagaacaatgacaaacttatgtgtatgtgagggcaagataaagagtagagagatggtatagttgggtatggagagaatgctgtaactgaactgctcccttcaagatgtcaggtaagattggagagaaaatgcaggatagcatttgtcacaggtagttggaatgtggagggaagactggaaggatgagaaggactgaggtggacctgtgggctgtgttagccggtgaaagttggagggaaagggaaatgggaggcagtagagcatggagttacatatgcaggcactggagtcaggctgttggagttcaaaggctagctcttctgtggatttgttatgtgactttacacgctctctcttgcctcaagttcctcttctgcaaaatgaggttaataataatacctgcataaacacatgcacagcacacagaacagaagctggaatgtgataagcacttcataagcattaattcttcttactgaaactcactagggtcactttgtgcatattatcctatttaatccttagtaactgtataggtaggtgttattatcttcattctgcaaatgagaaaactgaagtgcaaagaagtttcataattttcctcaatccacacagccactatatgatgtgataaagcttacctaagctagagtcttacctgatccatctggtgcccgggctagtgcactttctcctataacactcagcctaagctaggtagatatggcaagaccactggctgaggcaactcagatgtgatcaataggtagtagggaactgtggctgacttgggggcaggggaagcagcatgctggaaagattcatctggtatgtttatagaagagagcaggcagcaggcatggggggctgatgattcagaccagaaatggctgaggaaatggtgaggtctggcaaatgtcagaggagctgtgatagaagaatgagcagaatttatgactgatgcaaataaggtagatatgatggtacgtgacagaaactgactaagaagtctgtatgcagtgggtgcagcttagagtttcaacttgaaagtttcaaacctgggactctaagaaaatagtctgaatggtaatgagaaagttgtcactttagtatctgcttcccttgaagaaaagcacctttagaggaaccaacttggagaatagtgtcgcatcaaagtgggacacttcattatttttagtggcagcatggttctgatgagcacaccgtcggtaacctttacttcactgtcagtccagctctgtcaatcctcctttattaaggaaggaagctgatggatctttcctttctttctttctttctttcttccctggagtaggatgttttctgtacacagttagcatgtgaacttctttttaaaaagaagtttacattttactctaattctcatccataacggagtgtggtgatttgcatttgggcagttaggaaaatcagttctgttgacttcctgttttctatttctggcctcgagcagaacttcccatttgagtgggaccaagaagagcatacaaagctgaaatgttctccagaagttgatttccaatggggataaagtaagttaatggtctgaggtgtttgtctccccttgcccccgaagcttgccctttagttgctcttgtttttaaactacagggaatgaactgagggaagcattttttttttttttttcctgcaggtcagagtcccaaagctttagtgcagggttccaaggactcaggagttcaaaacatgctgcttaggctgagctcttggccagatttggagattccaatgtcttctccctttgacagttcctaagaatattttatttggatccttttctttaggtttttctgtctaaacattttattttacctagtgtgaaggggtgagggagggcagattgtttcctttcttcctcctctccccttccccctcccctctcccttattctctgtttataatttaaaaggatgctcactttcattttctcatttgcttccttcacagcaccctgtgaagctgatattgttatccccctttgacagaaggggaaactgcagtttcagtgaatttcagtgacttagtcaagtcactcagttaacagtgctgagagtgaagccctagtgttctgcctttagatctctttttcccagtaccatactgcttttctggtggaggttgtagtatataggatgatgtcagaaaggagaggctgggaagcctgaaacgatcacatcgacaattgaattgtctgttttttctaataaaatagaaaatgttaactaaatatattgccatgcaattcttcaagcatataggactttgggtccttttttgtgtctcagactttaagatgatgtctcctggggagtcatttactatatgcaaggagaatagctgaaaagtcagggtaggccagcagtatttcatgctttgtacttgggcaatatgggtttttctgttggaggttcagcagaggatggtagcaaagtgacatttaattctcctgcttgccaaatcttggtgaggccaaagtgggtgggggaatcggttgtgagtaggtgttaatgacgagtgtctggaccttgacgtcttctcagtcctggagtagggaaaaaggaacagaattagtgctgtttagaagaagctggtgatggaggtctgcttaggaatgagtgcagattaggacaggggcagtgagggaggcccacagagactctggctgcctgtctttcctggcatgtctgtggaatgaccttgctctgccaggactctgggaggaagcctttgattttgggggaatctttaggactatgcacataaccagactttcctgatgggaatctccaagggggcctcctgggccagggccgtgggccagcaggtgtcttcctaacatggtctgtgaatagtgcccaacctaggcggtgccttcttttcctgaatcaagccctttcctcctcagtgccaaagcagaagtggctgggtgggtgaagatctgagtgctggcccggggccacaagccatgggccactacccatattgctgtgagatcctgacctttctcttttctggactcacaagataaagagagtgaatgaggaggaaaatcaaatattgtggcagggaggggctgacaaacacaggcatggccaacagaagtctcccaccaaagtgaggagctgagagaaggatttggggagggaatgtcagaagtctcactcccaggcaaaggattcaacaaaggaaaatccgactctggcttgaatatggtccaggtgtggggttagtagtccatgttactgtctgacatgggagagcattccactgtgatggaaatggggtgggttggggtacaggaggaaccatagaggtagaagagaaaggaggtgagaaggaacatagtctggcagttgaccagagtgtatctggctgtatggtgtagtccccataacagggcacctatgtctgtacattgcacaaaaacaaccatccagtgtgttcttaaaagtcctgtgaaggtacattgtaatttgaactatattttgaagatatcagaggatcctatcatttagaagaatctcatgggaattactttttaaaaagaaaataatcattttagggaatagaaagtctctcaacgattggttttgaatctctgggttttaaatccatttactccaagtaggattcagtatttcactctttcactggcagtggattgttttttctcctacatatatggcttgaaagctcttaacaaaggatagtaattaattatttcccagctatttttacctttgacgtattaaaagttggaggaaactatttcatttaacagaatttaaacaaaatgaaaaagttattttccttaaggtattctgctgtgctttttcaaggaaaagcctcctccaaaggcacttttggagacagttaccaaaggaaaatcccacccaccaacagagacactcagcctctaagtttggcttttggaaaatgaacactattcttttttttccaaacaggacgctgtgagatcagtcatgtacactatgaaaataattggtgtgcattagtacaccttgtgccagatttcatgcttgttgaaaggtgattggattcaaaccagcacatttaaaggtcaactggttgttcttaaactgtgcagaattttaactctttcattataatggattttaaccaaatggccattttaggaaggagagagactgcatactgtgttttaactttctgacctttttgttcttaaattttttgtaaagttctcagggatttcctatggatggaaagggtctgagaaatcagttctcagctggcatttggaaaagggtggaagtagaaactgagttctttttaaactgctaaatttaggtcagggctttaatacgactgtgcacatcacataagcaatgtctaaatgtcaggctgaatgttctctctcttttaaataagtacttcaagttcgttagtaatagctagccctctgtctctttcttgcttctcctctcacctttgagcaactttttaagttcctttaacagctctgtggagaaaccaccatgtaatgatcaatatttaacccagntggttgacgttagccccgtttctggaatgggtatttcactgggctttggggttttgatgacgttttctccccagtgactgtggatgcatggattaaatttgttggtctgcaaaataccatctgtctaccagccattttgctgtatttcccaaaataaggtaggagactgatgtgtctcaaataagcagggtgaaatttagtcatctgatgatagtttcttgggttgtgcattagtgtcctgatgagcccctagcaactttcaacattatgaagactagtttggaagcctcaaaggcagtatctttcttgaagaaaaaaaaataacaccaggcatttccacaaataccatacacaagtggtcaggtaaaggctgtgggagttcacgcatctgtttaccttgagtgtgtgtatgaactcttgtagttctaactaaaggcaaatggaaactgtatagagtcccattttgtcaagctgacaattcagtatcctcttctttcctggttgctttatagcccactcttagttgttntctttctatatttcctacaatttttagctgtgaggctgtgtattcgttgcttaaaaattctgtgcctcatctgcttcacttgcaaaatggggaaaatgtcacaggatccttggggtgttgctttgccagccagaaacctttgtggctaatggtgcctttgcctgagttttgctcgggcccactgggctggttctgcccactcagcctgggcaggctgtgctgggctcacgctactggcccagatcttatgcctgccaagggtgagccaggcacaaaaaggcaaggggtatgtgaacaagggagctgcccattgtgcacagccagtcatgccagctgnagcagggcaggcagctccagatgccgacacaagtgctagctccctgtgaggctgtggctggaccaggtgtaccacagatggcttccactgctggcacccgggaatgtggtggtgcctggaagcttggagacgccaggaactacagagccccaaagagggtgtcacatccctggcttggggagctcccaggtctgggctccctgaagggctgcagttcctctcttcttctctcttctctccctcttctcacctgcaacatggcaagcaaggggtgtgtttcagccctgtttgtgttacagctctttcagtcccaccatttagtgggtcccaagttcttgtcctgtgtcctggaagaatgaggtacagggacaactggagggtgagcaaggcagagaggaactttattgagcgacggtacagctcccaggagacctgaagtgggtagctcctctctgcaggcaggttgtcctgtcaagcctgcagctctcaagagagaggagacccacagtgggtagctcctctctgcaggcaggtcatcccttcaaatgtgcagctctcaggagagagaagacctacagtgggtagctcctctctgcaggccagttgttccaacctctgcccagtctggctgagtccagggagttttatgggcttcagagaaggggaagtgagtgctaattggtctatggacagctgtgggcagcgtaagttctcactccagtctgtggaactagcagcctggcccccaggcttcaggccatcccaggcctaacggtggggcttcacggaaactgcccctttctgtccaggagtccgtctgcctcccgctgccatcaacctgctgcactggcacccaggctgttcatgccaaggggcacctgcagcccatactgagccactctcagctcccccttggcccccctcccatgctccttggtgcacagagtctggagggggccgaggcaacagggggctggtgtgtcagtggtactctgagcacgggcatacacagctgggtcgtgacagtgccccagcttgcacttaactttgctctgaaattggagtgggagctaggagtggggagaggctgggcagtgggagcaggcatttctgagcctgtgggggtaggggggtttcctgggcttctgagagtacagggatgcctgggtctgcacccacagctgggtggctgcagctgtgcccaggagggcaggactcccacccctcacactcagaagtgggtggggcttctgcctgttcccagctcccaacagctccatggaatgtgcagccctggctgcgccttgcctgctgcagctggcgtcttctcagcagccactccagatgggccaccactgtcatcaattacattacctaccttagtgttattgtgaaaattaaatgagttaatccatgtaaaatgctgggaacaatgtctggcataacatagaagctcaataaatattaattctcattattgttggtatcatttttgctataatttgaatcttttacatattgttgtgacatatggaggtttttgacctacagggtttcttctgagtggcatagctcagggtaaagtggctctcctcacctctcaataccctactgtcttttgcctaaattccagttaaggatggctagagacatcatatgggaaagggtggtcctgaaccagagagatgggagagcaaattgctaaggtggttcttgagggtagggatggagagccagacagagacaggtgtcctccagacagctgtcctttatcattcactcactgcctctgcagctcctgctgcctccttcagaaagcgaatgtatgttgcctctaatgcccttcctgagctaaagcccagtagttctcaaacatcctctttcaaagacactgagccctggtaaccttcattacattgttgttctcatatttttctcaagttaactcactcataacctacagtttcttattacattgatatattgattatgaatctttcaccattaacttttgttcatttctattccatcgcaaacttaatattcacaaaacaggcttaatctgagcacaagtgaaatggtatagctgcgaaatacctggcagtggtaggtactaggtgttataacatgatgacacttagaatttatagacacttagagcatagtttttcaaatattttggctgtaatcaataagagatagatttcacatcacagtctatacagatgtacatttatttatatgtatgtatgtaggcatagcttaagcaaaagtgtcatgaaacaatgttcaacctattgcacacaatgtactttcatgatttgtattctcttcttttttattgaaaatgagtctggtttgtaacccagtaaacacataacctacagtttgaaaaaccctgatctagaggaacatccagtgggtgcctcttgagttcttacgcactatccacatatcatccgtatcatacataatgggttgtggccatctcagttttattttgaggcactgcctcttctcatcctgacagaaaaaaaaaaaaaaaaaagaaaaagaaaaggaaagaaagctcagatcaagaactaacaccttatcttaaaacatataatctctcctttaccttatgctctttcctaataactattctttttcgattgtccaaaagaaaccactctaataacttataacaccatgtattagaaatttagaaaccatttttgaaagacagtaaagatgtaaattaatggggggactaaattatgcatggatagaaagactatttattataatgacatcagttctcccataaaatcaatgatatttcaataaaagggtcaacagtctttattttataatggagactcacaatcttattccaaaatttatatggaaatgcaagtagccaagaagaggcaatatagccctaaagtaaaagaacacggaggaaaaacttaaaactatctgatatcaatacttactataaagtacaatacttaagtgtggtactgacacaaagaaaaatggttcactgcagtgatcatatacatcttttgttagatgtatttgtatgtatttgatatttttgatgctgttgcaaattttattgttttgtaatttttaccctgttgcaagtatcagaaatacagttgatttttctatccagcaaacttgctaaactttgtggttaatggaaacacttcagctatagattcttttcaataacacaatcacattgtctaagaatatttttattttgcttattctttttcaatcctatgccttttcttgttttcccccccttgctttattgctttggctgagatttccagtgtcaaatagaaatgttgatggtaagcatttttttctcattcctgatttcagaagaaaagcttgtagcatttcaatattgagttattttttttgtggtgttaacaattttttttgtaaacaccttttattacatttaaagagttttcttctgtttctagtttgctaagagttttcttgttagacgttaaattttatcaaatggcatttctgaatctgttgatataatagaaatttctccctcattctgttaatctggttaactatattaaattgatattttgaatgttaaaccaactgtattagtctccaaccttgtagtaactaaactgaatttagttacactgtgtttcattactggattcaggtggttaacatttaagattttgcactgtcacatgtaagagagttctggcttgacttttcttttcttttaataactttgttgggttttggtgtaaaggatatgctgacttcataatacaagttgggagtggttcctgtttttctcttctctgtagagtttatgtaagattactgttaattcttccttatctgtttggcagaattcaacagtgaatcgtccatttcatataaacaagtttatttgcttaaggttactcagaatataattttaatatatctgaaggatcttcagttaatgtccctttttcatttcagatattggatatttgtaccttttgttatttcctcctttatcagtcagtctcactaggggcttatcagttttattagtcatttcaaagaaccatctgttggctttttattgatattctttattgtatgtttttaaaattttcattgatttctattcttatattatcatttcatttcttctttttctttggacttaatttgctgttcttatataattataattatataatttattgaaatatatgttaagataattgatttttaggctttattctcacttaatatttacatttaagactatacatctccctcaaaggctggatttagctatatggcacaaattttctactgtaggattttcacttttattcagttcaaaatgttttccaatatctgttttgatttcttctttgagctacatgttctttataaatatattacctaatttctaaatatatggggattttccagttgtctttttgttattgatatctagtttaattccactttggtcactttaagagaatttgaattctgccattactagggctgtgttctatatatgttgaagttttaaaatcatgttgttcccattttctctataactggtgactattttcccacttattagtctgttacaagaggtgtgttaaaatgtcttatgatttgtgggattatcagtttttgtaattctgttcatttttgctttaaataatttaagcctctgttattaggagcatatacttttaaaattattatatcttcctagtaaattcagccatgtatttcctcctctttatctattaatgttttgtcttaaaatctactttgtatggtgtgaacatggctacttcagctttattctggggtagtgcctgcatagcgacctctttctattcttttcaccttcaatcttatatatttaagaaatgtctcttgtaagaaacatatagctttgtttaatacagcctggcaaatttcgtcttttgaataaaatcttaatgtttgtgatttatgtaattattatatttgtgttttgtttaaatctatcattattatttgctctccatttgtctcatcttttgtttccccttttttaaaatcttttttactttctttgtcttgaggtttagaaaatttattattattttccacttttcctgctctgttgacttccaccactcccaacttatacacttctgtttatgtgttttcatttggcatcaatattaaccccctcaggacattattatcaaagacagtcaatatctatttagatatacccacatagttagccccctttttgactcctcgttttttctgtatctcagtttcccagctgcgatcatttctgtctgcctgaagagtacctgcagtgcttccttgagtacgtgaaagctgctgaggaatctctcagcttttatttttctgaaaatgtctttattttagctttgtttctgaaatacattttcacttggtatagaattctaggttgaatttccttttccttaggcatttgaagatgtttcattgttttctgcttccattgccatccaaagtcttctaaaacttccctaggtaggtaggtagaaatatttaactcaaaggatgaataaaaatgtatccacaaacccatacttctttttttaatgggatttaaagtttatagatatttagtataaagtatttttacatctgcagattgaatgcagatgatcaaaggaatcaagtatttgatgattcaaaatagagacctttgttttacatatagactaagggttggtccaggactatcaaaacaattctaggaagtatttttctaactcttgaagagagagagagggagcataaaatgtacataaacctaagttaaaagaagtatgtaaaagtatgttaaaaataatgcaaaaagcatatatgcatatattttgcttgaacttgatttccactgacttggagtagttcattctctaagaatctcatgtcatattattttatatctttctcatttgtgaagtcattcaagagatcctgccttgtatgtgttttccagataatttacacttttatttttacatagatgttgattagctgtgtttcattgaatattctcagttttgggtatcagttttcagcaaaacaactaaatgtgacaccttcctactgagcatattgggtctatacgtgtgcatttgacttacgacttatattttcacctaaaaaatattttggatacaatattaaattcttttagcattaatagagtgcttgaaatatgaacttagtgcttttacttttaaaatattttaaaattttgatatttaaaaatttgatattttaaaatattttttctgtactaaaatgcactacaatataatgtgacaattatgaatatggattttagattaagacaaacctgggctggaatagtagctctgttccttactagttgtgtatccttggaaaaacaactccaactttctaagcattagtttccttatctgtaacacagggtccataatttctaccttacaatgctgttttaagaataaacgaagtgggaaatgagttagtatcatattcatatatggcagccattattattattattattattattattattaaatttctatagtatgttattgcctaagtttgttcatagaataatgtattggcaaataatattccagtaggagaattattcttataaaataaattaaagtaacttactttattctttagagtttaccaagataggtatatttagtgaacatgggagtcaacagcntataataaattctgtattcttaatttaacaagcatttattgagtctctaacaacaagcttagcagtgtttaaaacaccatggcagggctgggcatggtggcttatgcctgtaatccctcactttgggaggccaaggtgggaggatcacttgaggtcaggagttcgagaccagtgtggtcaacatagcaaagcatcgtctctactgaaaatacaaaaattatctcggcatggtggcaagcacctataatcccagctacttgggaggttgaggcaggagaattgcttggatcagggaggtggaggttgcagtaagaactcgccactgcactccactccagcctgggcgacagtgcaagactgtctcaaagaaacaaaacaaaacaaaacaaaacaaaaaaactaccacggcaggaggaatttcaagcatgtgaaagctgttaccaaggataattgtgcctccatcacaggtgtctgcctctccccatctctgctgtcagtgctggaacccacacagtatcacttgtctgggttttcacagtagctgccttaccacttaactcccatttattgtctctccaatccatcctttatactttttccagaaattatctttctaaaacaaaatcatgccatcatcattcacacattcatagacagctgttgtctgtggaaaacacttcagcctcattaagatgtaaggccctccgtactcttgcccttccagctgtatcacctcctgtttcctttcctgcagcctatactccggccataggactaattgcaaatctccattagtaccgtgtccttcccagctgttattttagctagacatgtttttttagccatttcttgcctctcaaaattgtactcattctttaagatataagagaaacaccatcttatctatagtctccctagatgtagaggatgaattcgagtgttaaaagcaagaggtgggcgttgtagtgttctaaggtagggagactaggtatagaaagaaaccttgagatggaaaccaaggacagagaaacttttgcagaatgctgtctctgtgggctgcctgccctgtctttcagctggaagtggttcttcctttctgtgttctctttctctgatgggctgctgagaattattgcatgtaggaagccagagaatgtctcactgttctcccagcagctgctgcttagggctctcttactccactcttttttgattccctggtctcctgcagagccatttattgtctggaccttccctatacgttgtcttccccttagctcaaggcctggcctctccttatctctcctcagagtttgacttctgatgggatctgttgtgctggaactagctgtgatgtttctcttcttcctgcttcacctatgggttggttcctcagcccttatactggtcccactggcaccagccctgacccgattaattccctttcatcgtcctccatacccaaaggtcctgtcttggaccagggaggctcactgggccaagtattcatcacaaatgttaataaatataacctaattttaaaagaaatatctccaaagagtgtagccttctaggagactgagtacaaaaaaaagaaaggggtggagcaggacagagtatgaaagaagactgcaagaaaaggtcaggtacaactgggagagaaaaatgcagaagctgtgggcatgcaaggccagaagtgtagccaagaagcagnaggtgaagtcaaaggtggatgaagggaaagaaagatgaaatgagagaaaaaatcctaggagtcttagcattggagggggaactcaggtgcgagaaatgatctaataatagttgaatggagagaaaatcaatgtatggtcaatcttcattatcacagattatgtgtttgcaaatccacctacttgctaaaatttatctgtaatcccaaaagcaatccttgcggcgcttctgcagtcatttgtggacgagcgtgaagcagtgaaaaatttaagcagtgccacatgtgtatttccagctgagggtgaacaagggatgctcagccatcgtgtttcagccctcatgctgtaagcgagggtcctttccatgatacgtttaatgctgtgtttttgaattcttgtgtttttcactggtgattttgtcatgtgaaatggcttccaagcatagtgctgaagtgctctccagtgctcctaagcacaagaaggctgtaataagaagaaatctggccaggtgccctggtgcatgagaccagcctggccaacatggtgcaaccccatctctactaaaaacataaaaatcagctgggcctggtggtgtgcacctgtaatcctagctactcgggaggctgaggcatgagaatagcttgaacccgagaggcggaggttgcagtgaaccgagatcatgccactgcactccagcctggatgacagagcaagactgtgtctcaaaataaataaataaataaataaataaaagaaaagaaagaaagaaaaaaaaagagaaatctgcatgttggataaactttgttcaaacatgagttatagagctgctggcagggtgtttagtgttaatgaattaacaatatatattaaaataagctatctttaaatagaaacacacaaaaaacaaagttatgtattgattaggtgatgaaaatattgtgaccagaacttgcagaaacctgatcttacatttcccctgggagcaatggttcagtatttgctaattcagtgttctcagtgactttatagaatgtaactgccacaaataacaagaatcaactctgtaaacatttttgttggtcaatggatatgcatgtttagacattttgtagaattatagtcaacccaagtgaaatggaactccttttatttgacttgggaagttgctctattctcttctgtttcaaacaaaactctaaataaaatcctcttttgttctggtttattttagcagatgtttactggtgtttactggcaaatgtgttgagtaagttaggtaaagttgacctagacacagtttttgctcccaaggaattctcaattgatcatggaagacaggagatgtgtgtaatcaacagtattgacattaatttgtattcctggaacaggtatcgactagagtcaaagaaggttttggctggtcctgaacaacaaggaacccaacgtaggttcacaaaataaccacatattgtccatagagtaggtgtctacaacatgctagtgaaggttgacattatcttagagcttcggggatttatagatggaagggatcctacaggcccagtatgtgacaaggacctgagcatgtttagatgtagagctagaactgaaaaccaagcctcatggctgaaactgaatcctttcccactaaaccatacaggctctatgcgctcgaactagttattggagtcccggcttaaaatgagctcatgttccagaaattccacttaggtcagatgtttataagtcagtctgaggttgttccaggatgagctccaaggggtctgttttgctgtatatgaatatttttatagaaggaagctcataaattttcatgtgattctcaaaggagttcatgattccaaaaagtctaagaacttctgtgcttattctgaggttaactgtgcaccacaaatactaaattctatttggggtggtgtcttgacattgtattttgtatccctatcaatctagcagaagatttttttttttaaataaagaaaatgctcactcttggctaggatgtggtgaaacaaaacttcctatattgtcagtggcagtataaattggtatgaattttctaaaaagacattttccactttttgcaccagataccaaatttgtctttcaataatatattctaagaaagcaataagaaaaaggaagtaattagaaattatgtataaagatatttatagcatttttgttcataatatgaaaactaggaatcaaagtgtctaagaattacagttttaaaatatcacttaggccgggtgcggtggctcaagcctgtaatcccagcactttggaaggctgaggcaggtggatcgcctgaggtcaggagttcgagaccagcctggccaacatggcaaaaccctgtctctactaaaaatacaaaaatcagctaggcatagtggcgggtgcctgtagtcccagctactcaggaggctgaggcaggagaatagcttcaacatgggaggcagaggttgagccgagattgtgccactgcactccagcctgggcgacagggtgaaactccatgtaaaaaaaaaaaatcacttaatattatgaaaaactgtttatgacaagacatgatgtgaaaataatcatggcatatatagcataatcacaatttgtttatgtgtgaacagaataacatgttaacagaggttatcttttgctaatnggactagaggtgtttcttttcctttttattttttctttttgtatttttcaaattgtctaaaagactatatatttttataatcagaagaaatattgcaaccatattttgtcccanttgaactatgatttacttacgggaagtcctatccttgtttcttagtttctacattttaaaatgtctcatcattcattttggctgaaagttaaaatgcaatctcagttatttcacgttaattcaattacaagcccttctcttcccacagtatcatttcatcttaaaccttcatactcagcctcctttgcaactctggcctctcttgctttccattcctttttgttctttctctgattaaaaaaaaatactaaattctgtctgcttttctttgacagcattagccttttttctcctctgctcagaatataatttttgctattcagtttttcaaatatttaccactgttccctttgtttctttatcctggtttttaattttgtaaggtagaggaagcattcatggaatagtctgttccaaacctcagagcctcagtagtgcttttgcattaattaaaaagtatgtattctttttgggatttcccaaagtattttcccattatatcaggaacacatgtgtatatgtgcatacatagggtatgcatgagaatgagtgtattcacgtgtgcatgtatgcattcatgtttgtgtgcatgttggtgcatacatgtgcaagttggtgtgcacttgtgagtgaatacatgttccagttcttccagaacaggaactgtgtcctttcctatatgccctacgcaagtagacactgcaatgatgctgactgcctgtttgcctgtctctgtatagccacctttcagagcttgccatctggatctcagacagtatgcagaggagaggaatgttctaatccaccctggtaccaacaggctggcatctgtactttgaaagctttgatgaagaagatgcaaattgtgttggctgtgtgggcttttcagctgcttcctgactgggctagagacaggcagcataacttttaatctctccaaaagcctgccaactggcaaagagatacatgtattagataagatggtggatctcgatttatatatgtatgaatgcagactgaattaaaatggcaccctaagggagaagccaaggaccaaatcaggagaccctctaactgagtcagaaatcaaggccaggatttataggatgaacatttttaagtgtacattagaatgtaaagtaggtatttgtaattgaagtactatgcttattttatttccataaacctaaggtctggcttcgaagtggcctcagggtatatccgtcagcactgagccttgtaaatttgcctgctaaatcaaacctatgatgaaaagaaccaggcaaataacactgtcttgcagtgtgcaagtcccgtggctgtattatagagtgctcagctcagtgtttcacagtggagaagaacgtacgttgatatgctttctgggtttgagagctcttccttcttcatccagaagacagagctgggtagagaaaaggataaccagcaagacaaaggctttatcccaatattatatgtttaaaactcaaagagatatggtgaaaatgggactttattaaatttgcctgattggaaacaaacatgcaaattgtacaagattcctaaatgtgccaaaatggcaaggagagagccctgacgagcatggagaatagtgagtaatgcttatgtcctaacagtgccccttgccttcattgacctttggaaatattgtgaaaaagtcaaccttttctattctgtctgtatagtcttacagtgtttcctctctttttctccctctagggagttatccaaagcccccttcacaagaaatgctagctttcaggaataatcaatcaagcacacctttgagcaaatgtaagatttatgttcattctatttagatatttgattttgacattgtatcctttattttggaanaaaatgaatgtcacctacatgcagacagatgaggcattttatgcttttgttgggggaggataggtttaggggagctctcccatttgcaacccggctttaaaccccacgtggcatgaagaaatcaattaaacagacagaaactcttctgggattgggaatctggcttctcatttaaaagaatatccccatttttctaaccataataaattttaattttcaagtaaaagccattacgtcaattttaatgtcaaatacattttaaaaagaagatgcagactgttgaaaagatggtggaaatgattacaacctaagcttggagcttactgaagtcaatcaacttcaacctggagcttgctgcagttccgactgcacttagatggttttgctttagtttccccattttagtgtagcagaggctgttttgttacctgatctttttttgtagagagaatgaaactgcctgagggacaatacagtgcactggagagggatgaaataaagtctcaagagctgcttgtactataccacctacctcaaacagcagatgttacagaactgcttttaaaaaaatgttgcctttcacatgtcatgctaaaaatatatacctaaaaagacctaaaaaaaaaaaccttaaaagaactagagaagcaggctgtagttatacaaaagctatatgcaagatcatggaagcaaaaaaaaaatgcataaagacatattagagctttcttaagttccaagggagcttttgataatacattcaaaacataaatgggaaagtcatcagagaattgcatagtccccaggagactgcagaaggctttgaaatggatttaataacattgatgggtcggataggaagcccttattccctttgacttatcatctttcttttctttttaaaattcactttcaggaaatagttacatgatcaactctacctggctgactcaaatttggttctcggtttgaactctagttatctgtatatcttacagctgtccccttcagttgcttatcatgtgacttgtcattctgactgggtttgaagcttacaaaggtcaagaaacacatctttcatatctttggaatttcctctgtaattttgataccctgattgtgtttgcagatggtgtttaacaaatgttgcctggctcactggatacttccagattttaaaaaaagttaacagaatgatcttcaactctgcttccattgttaatatttatgtgctatattctgataaacccgtagaagaccagataagacaaaagcaggagaaacaagttgtagatacaatagtgagcgtgtaaaaggcatttaataatgccttgacatgaataataaacataccagtaataaagatacaacaaccttacgtttccatagattcttgattcctctaaaagcactttcatataataaaggacagagggataaagggaggagtaaatataaatgcaaggaataccaaaggaatgtagacatgaaaaagcaagaggaccaaagcaagacaaagaaaataatagccaagaataaagaaattgagggagaacttactaataacttggaacagttgttggctaaacagcacacatagcagagtatcaaataaatattgacaatgttggtgttcttgtagtgagtagaatatcctatagacagaatactctaggatattctatagacagagtattctgtctatagggtattctgccctgtttatgttttgtcttgttttctgctgagttattagggaaaggagtatcgtggattccctcactttctttctcttccatttttattcgtgatggttaatattgatactagtatggctatctttactccagatagtcaatccacatcatcaaaaagatatggacgtttgagtgatactcaacttcagtagcttagttcagtgatttcacaaaagctcagttaggcttgctgctgagagcataagtgaattttgcccttgttgtaaggttctaaaaatttcctaaccttaggaggcaggtctaaaattattgtctataatgctgaatatagtaacttattataaagaaattctaagaaaataagacatatcaactatgttatagaactgatattaaatctagaactgaaaaaaatacagatagaaaagttctgcctgtcatgtgctagaggctacaagagatccctaaaacacttttattactgctttgaagggataagctccctccaaaagcatggatcaactattttagagatttagagattgacactgctgttttggcaataattctaccttcatactttcagttctggatcagcacagaaaactctctcctttgtcagattgaaaacctgtagcagggggacagccaagatggccgaataggaacagctctggtctacagcttccatcaagctaccaatgactttcttcacagaattggaaaaaactactttaaagttcatatggcaccaaaaaagatcccgcattgccaagtcaatcctaagccaaaagaacaaagctggaggcatcacactacctgacttcaaactatactacaaggctacagtaaccaaaacagcatggtactgctaccaaaacagagatatagatcaatggaacagaacagagccctcagaaataatgccacatatctacaactatctgatctttgacaaatctgagaaaaacaagcaatggggaaaggattccctanttaataaatggtcctgggaaaactggctagccatatgtagaaagctgaaactggatcccttccttacaccttatacaaaaattaattcaagatggattaaagacttaaacgttagacctaaaaccataaaaaccctagaagaaaacctaggcattaccattcaggacataggcatgggcaaggacttcatgtctaaaacaccaaaagcaatggcaaccaaagccaaaattgacaaatgggatctaattaaactaaagagcttctgcacagcaaaagaaactaccatcagagtgaacaagcaacctacaggatgggagaaaattttcacaatctattcatctgacaaagggctaatatccagaatctacaatgaactcnaacaaatttacaagaaaaaaacaaacaaccccatcaaaaagtgggcgaaggacacgaacagacacttctcaaaagaagacatttatgccaccaaaaaaacacatgaaaaaatgctcaccatcactggccatcagagaaatgcaaatcaaaaccacaatgagataccatctcacaccagttagaatggcgatcattaaaaagtcaggaaacaacaggtgctggagaggatgtggagaaataggaacacttttacactgttggtgggactgtaaaccagttcaaccattgtggaagtcagtgtggcgattcctcagggatctagaactagaaataccatttgacccagccatcccattactgggtatatacccaaaggactataaatcatgctgctataaagacacatgcacacgtatgtttattgcggctctattcacaatagcaaagacttggaaccaacccaaatgtccaacaatgatagactggattaagaaaatgtggcacatatacaccatggaatactatgcagccataaaacatgatgagttcatgtcctttgtagggacatggatgaaattggaaatcatcattctcagtaaactatcgcaagaacaaaaaaccaaacacctcatattcttactcataggtgggaattgaacaatgagaacacatggacacaggaaggggaacatcacactctggggactgttgtggggtgggggaagcggggagggatagtattaggagatatacctaatgctaaatgatgagttaatgggtgcagcacaccagcatggcacatgtatacatatgtaactaacctgcacattgtgcacatgtaccctaaaacttaaagtttaataataataaaattaaattaaaaaaaaaaagaaaacctgtagctctggtatcatagtggctgtagtgactggttgaatgatttaatctatttcagcctcagttgccnnagctgttagaggagttaattatatcagtcctgccttataatcatagcaataattcccatttccaaatgcctgccatgggtcaggttcttgctatgtctttggcacatattatctttaagtctcatcaactctgcaaggaaggaacaattgtcattcacagtttacagctgagaaagctgaggctcagattatttcagtaagctgcctgaagtcatgcagctaagtggcaaagccaggatataaacttcatatgtatgttcacaaagtccccgcttagtcctccatggaatttttagagttatttaaaatgacatgtgtgaaagtgttttgaaaatagcaaagttccttgtaaatgcatgttattattatcatactgatgaatataaattacttaacatctatttaccaagttccttatagatatttagcactgagtcagttttcattttggacaatctatggaattagttatttctctaatgtagtattacataagatgcattataaataaatcttaaatattttcaagtggaaatttcttccatccttgggaccaggttcttccttcttctccttcttcttcttttttatttttatttttttgagactgggtctctgtcacccagtctgggatgcagtggcacaatcatggatggctcactgcagcctcgaccttttgggttcaagtgatcctttctcctcagcctctccagtagctgggaccacaggtatggccaccacacccagctaatttttttatttttctagagatggtgtctcactatgttgcctaggctgatctcaaactcctgggctcaagttatcctgtttcaatctccctaagtgctgggattagaggtatgagccaccacacccagcctgggttttagtttctttttgatcatatttggagaaaaaaagaaaagaagcaaatttgctaatcaaaattgagtgaatgtttcaagaaacaaaaccaattaaatgtagtccaaccttgagaatcagcaagtaaaaacctctgaagccaagagggctaacaggaaaactgaaggagaggagagaaatataccataagcattttcaaacctctgcttcaaattcttgtatttataaatggtctgggccagcagtgcaactctccctgtctcgctctttgttgtttattttttggagtctttaatgaccaatcgggttgctgaaatttacttgaagagtttattcttgattctgaggtataagattttctgtgtgaagatggctgggaatccacacaactctcctaaaataagcaccaagttttggaaagaattttctcttgtggaaaacatccatttccaaagagagccatcagcatgagattgcttttttttctttttaaccgcccccaacccaaggagaaagctgaggggagtcagtctgtgaagcagccaggaatcaactttcatgacagttttaacattcaaggcagacttttcccttggtcttttggaagaactgctgaaatctcaatgaaagttcatgaaattctgtagaggaatcagctgagtctagaaataagctgttccttattgtttcctctgtttccttatatataaagagtgggtaaaaagaagcaccttggaaagtcattgtgagattaaatggcataatgcatgcacatctcctggcacaaactaatcaccactgttgtgttctaagccagtttcctaaatacacagatccagttgttttttaagtctcagtgtgaactgtttattctgtttggcccatgtggatatctaaagggttcacaaaaatgctttcaaattgataaaatatggaggaagccgcttttctagtcttcatcaaggatctgcgttgggtggaatagaatctttgtttgggtttggtaagagtttcatgatgcaggattttatagagagggagctaatgccattgggtggctgatcacctaggtggaatgaatgtggggccactcatccatgcatttttctgcaggtgagatgggataggtagcccttgtacagttcttctgtcagagatcttggtcacatttgagtctctgctgggctaaggcagaagcccttataggaggataggaccactacctggccaggcttggttttctttagctcagagcctggaattggctaaatttgaacagacaagattaaaaaaaacaagctgattatacaagtgatattgtaaagaaaaagctagataccataagagctggataccagcccagtgttgctgtttggatttgatcatactctcttgagtacaggaacaagagggcagcctaacattgtccctgaagccctctgcccacagccagtcagatccatgtccaaccttagcagctaggatgctggccatccctgtggcccaggccccatttgtacaagttctgggactggggtgaaggtattcttgttataatgcctttttaacacaattctggccttttgggagagagagtcaatgttttacactctggggantcaacttgtgctcggattcacctttggcaagggtcctttagtggaatggactctgcccagggagtcagtggactgctgtttgctggttgattttagacaagttactttatgtttgtgggcctcattttcctctgagcaaagacatctctaacctgagtcacagcacaatctttgtggtctgactctgtctggggcatggaaaattgtgtgtgtgtgtgtgtgtgtgtgtgtgtgtgtgcatgtgtgtgtctccagtcactggttctggggatgttcctccaaactgttcttgccttctttctgttatccaaacttttctgtgcagaagaacaagatttaagtttgaatggatcattgtttcttttcggctaaacaactgctgatagtcagaggatgacctatttctgaagcagacgaccaaggagaaatttatggatttctattctttagacttaaccagtgttccttcttggaacatatgttatggaacttgactaatcgccctggcaatatgttgccaaagttttcctggcaatagatcaaagtctgtaatataccagcacatcagctttgcagagctcagacaatgagaaaacaggtaggggtgggagaaagcacttgcaattaattttggagtcagattttgatagaaaagtagaaagaggataggactaattgacttctgaaagaattacangtggctggtgtgccccatgactcacactgtaatctaaatactttgggaggccaaggtgggagggtctcatgaggccaggggtttgagatcagcctggggaacatagtgagaccctgtctctacaaaaaataaaaaaaattagccaggcttagtggcatgtgcctatgatcccagctgcttgggaggttgaggtgggaggatcacttgcaactgggaggttgaggctgcagtgaaccgtgttcacaccactgcactccagcctggacaacagagcaagatcctgcctcaaaaacaaaaacaaaaacaaaaaaaaagaaagacaaaaaagaattgcaagcggccaatacataagagaagatgcctaacacctaaccccccaattagcattgtgattataaagataacaatgctatcatttccccacatcattttggcagaaatgtgaatggatggttaaactcggtgtgcctgtgagtttgatgaaatggatgtgctcatacaactacctgatacaaccttttggagggcaggtggctgatacttactgaaatgtgaaatgtataatcttcttgcccagaaattctgggtctaggacttatcctaagaagacaactatacaaatgtaaaaatacatttatgtagtatgtttgcaaaagcatattcatggggaaaatgagaaataactttaatgtttatcaatagagaactggtatagtaaattatgataaatacctactgtgaaatcctgcatagtcaataaaatgatggtgtaaagcttcatatattaatgtgaaaaattatttaatggtacaaaacaggttatgaaacacaacaatcacatttctatacagtcatattactagaaatatgggaagttgttaatttaaatctgaacagttagaatttcaggctacctttacttcctttgctatttaactgtttcctctcccacctatcaactctatgtccttagggaaacttatttaacctttctcactcttggtgaaaatggagataataccaaactcttagaggttgttgtgagaatcaagcaataaaatacatgtcaagcacctagtaaaaaatgtattttgatttttttttgtcatacacagtttcctttttttctttcattatgtgagtacaaacagctgtgttcctatgcccagattcaaagagagaaagctaagtgggcttttgaataacttccacttattttaatgcagggaaagctctagttccaaatatgtggaacagtattttcctaaggctgcaatgtgtcagaaaaagaccatattgagtcattgttttctgaagccaagacaggagattgagagacggatgctgatgggcagcctaaaataatatttcattcttgtcatccttaggcagtttaagaccaagtcattttggatagatctacagtttccctctcggtttggaagaacaaagcttttgttatttatgttcttaaacaacagcgctttgtcctatactcaggagcgtgcaaagcaaacagaagatttcctgaacggccatcccatttatggtgaggagtcagtccaagaggtaagtagacatactcagctgcaaccatctgcagagggcccacattggcagcaaaaggaaatagccaagactcacaggagcacaacagccagtcaggtttgggattcacttctctgatactgtgccaaagttggtggactcagccattctgaaactcactgttcacttggggcctgctttgcacaacaaaacaaatagccctgttttgctttccatgtctgaggcagaaaaataaaaatggcaatattttgagtgtttttacattgggaatttctggtccatagataattatttcagatacccctgtgtaatcttttcagagctgttgaaaactgtggaataggggataattagggctcaagagatttcattaatggttaaaggatcattagaaggacacgtactgtatccctcttcttatttctcttcctgcactaaaacaactcctggcttgctaccatacttccgcacccatgtgcaattttcacttagcaaaaggtcaagtctaagtagaatctatgaagttgggattgattctgattggtaataatgctagctagcaagcattgaaaatttgtaccaggttttctgttaagtagtctgcatgcactatctcaatgattcttaaggagtggtccatagatcactggctttacaaacattgacgcatggtggtgggtgtgggcaatgaaaaggcagattcctagattctactctagatccatgggatcagcatcctgtagtgggagccagggatctaccattttagcaggtgccttgggtcatcatccttatgcacatgacattcgagagccactgtgttatttcctagtgcaactgtgactcagtgtaatctgctttctttccactcctctgatttctgtgtgtaaattttcatgacaaaagttagacaaaataccatggactgaagttagatatagagcaactcatgtctcttttagttgctggtgattgcaaatntatctccatggccaaattgcttttgaggcactatatgtgatatttatctgtattgtgggaaggttaaagaagtgagaactctttccttgcttagtggtggcctgtgctctggaggtagagaggaagacacaggggccatggaggtgggacttacaggtgtggtacaggttgtataatcatgatggtgaccctgcatggagaagggaaagcttgaccttttccttggctcagggctatgcaaatagggctggcccatttctgagaggggaaggtagctgatatgcaggtgtgattccctagggcccagaaagacctgcctgccttctgcctttgttgtcatgcttcatgaggcctgaaatgttcactggtggttatttctctggttctcagctttagctctagaaagcccctattgaaatgacatgccacttggaagatagcaggaccatttacttatattttcacagactgctttaatctgctactctggggatggcacacaaaaagatttagttgatgggagggaggttaggcccctttgtgggccacaaagaagaatctggggagcccagggagactattctgggggtagaagtgaggaggaaaggctctaaagacaaactggacctatgtcacagttccgagggctgtcctccagaatacattgttttcctgaaattctccagccccttccatcattttcctctcagtgaatgtccagtgctgaataactgcccccttagtcacaggactggactgcagcagtgctgcaggtggtgaggctcagtggcacaagtggctctgggagggaatcttgatgtcggattctgtagctgcaccagcagagggggaagagggagataattacccacctctgagtctgagatccccctacccccagtgcattcttctgccaggagcaggatcattagaataagtgagacttagcttagctcattcaactccttgccaggccccatgcaaagctttcaaactttcaaatatacgatcatttctagagactatgttgggatcccctgcatttctttatccatttgttgagaaggaccagagatgatgcctaactttagccaagagtttgtctgtgggtccgataagcctcacatttgattttattggaattttaatcttgcagaaagtaccctatgtttcaattttaaagcattttttttgttaaactgaaaacatccctcaatttttccaatgttcgtttgtcctctagtgctaatttatgtggtaagtggtactggttcattaatttactcaggagggtgtaaccacctttcatggagaaggggtggctaggaaggggtttctagtgaaggaattcatttttcttggtcttcatggtgggtgctggggaagggtgtgcagtcagaggggctgcatttgcagaaacatggctctgtgtgtgagcctgggttctcaggaataggaagcaggtaggtgcagtgggtgggtattcatgtgacagtggaggaagataaggacaaagatcatgcatgagtagtgaatgaatgaatgaatgaatgaatgaatgaatgaatgaatgattgtgtatagaagtccatactccttctctggggtggctattccttcaccaagcagactctgttctttcttctgctgcttcttagtgagcacgtctaagtctcagttgatattctcttgctctgagaaatttctcatcaatgggaggagaaaatataattcgcttcaacatagctcatatttaagctgagaattcagcatgaattccagacatggttcatgtattttggataatcagcatagctgttcatgatcggtaaccctcttttttctcctccttcaaatcgtttttggttaggttaccatgactgaagattaatgacttccattattttttttccctcatgcaggaatgtttaaactagtctaaactttgtaccaactatcatatgaatcatgtctactactgttaccccttgtgtgtcatgtcctgggttagtgtccttgcatgacacagcaaaatacagggcagggttaaaagtgtcaattgagaaccaggcaaaaaactgatgattaatagtgaccaacacacttcactgtgctgttatcttagaggccttaaggcaaaatcttacttacaaatattagttgaaatgcaatatgtgatgttagtagacacatttcaccacatctggcagttcattaattcaccttcattttttttttcttttcttcttttttttaatcttttttttttatactttaagtactagggtacatgtgcacaatgtgcagatttgttacataggcatacatgtgccatgttggtttgctgcacccatcaactcgtcatttatattaggtatttctcctaatgctatccctccctcagccccctacccactgacaggccctcgtgtgtgatgttccctgccctgtgtccaagtgttctcattgttcagttcccacctatgagtgagaacatgcggtgtttggttttctgtccttgtgatagtttgctgagaatgatggtttccagcttcatccatctccctgcaaaggacatgatctcatccttttttatggctgcatagtattccatggaattcaccttcattttcaatattgtgtatatttattgcagtgagcttaatcctaataaaaacaattttatttctatttatttatgttttttcaattttttctttgagacaggatctcactctgtcactgaggctggagtgcaatagcacaaccatagctcactgcagcctccaactcctggacttaagtgatcctcccaccttggcctcccaagtagctgggactacaggtgtgtgctaccatgcccagctatttatttatttgtttctcttttttgcagagatggggtcttgctgtgttgctcagggtggtctcaaactcctggattcaagtgatccttggccttctaaagggctgggattactaaaggggcgagccaccatttctagctgacaattttcttttttttttttttttaattatactttaagttttagggtacatgtgcacattgtgcaggttagttacatatgtatacatgtgccatgctggtgcgctgcacccactaacgcgtcatctagcattaggtatatctcccaatgctatccctccngacaattttcttttaatgagcagtcaccatataataggctcagttctaagcatgtatttgcccatttaatcttcacaccagcctaggaggtagttactgtgtgtggcacccttttatataggaggaaactgaggcataatgctgttaagtagcttgctcagggtctaacaattaagagtcagagctgggatgtgaacccaggtggcctgactccagagtttctaccaaccaccatgttatactgctttacatgtttaaagcaaagatatggttttagcatcaaatattaagaatgcactccccacatttttcttattaaatgtaattgccagtttttgtatatgtcattgtcctaatgctttcgagaaacttagacaaagagcaagaccacagataaatggatccttctgttcaggtctcattacctagaagagttttgactgcaatatatgagtactaaaagttgatggtttatgctaattttaagtgtaatatattttagaattttgtcacatgcattattantatgatttcatattcatggccttaggaagattaatttaaacaataacaacaagaacaacaacaacaacaaaatacaacaaaaaatttcccccatgtgccaagagcaaattttgaggtccatttatccagataaagtgttttgttatctgaaccaagaacatgaactttatctttatagtgaccacagactcccatctctagtatcatgatttttaatttgaattaaagcatttttttttgctttgttaagatgaggcaggccttcttgctgacattttaaaaagcaactatttttctttcagtttacactatgaggcattggctccaactgtcagcattgaaactgtcagcagttccctaccaggaaactggttccaaggtctagggtttccttaggtagaggctggcactgtgaaaataatggggctctttatccatgtcacctggaatggagttaataccctgccagtcttagttgatttgacatactaacaggatgggtctgaacgttttctatagtttactcatgagtgactttctttggcttacgtaaatggcaaggccagacaaattagcttatggacctagcaatcattcttggcccagattttgagacacttttcaatcaaccatagttgctctaatacctgagatttgctgacagtgcttggttcagaaaaaggttcagtttcctgagcaatttttcttttattgggatcatcttaattcttgtttgcggggttaagatgaaggaaatatgagcaaggactgcactcagctatttgggtgacccttgtataccatgagcttcttagatagggcctgatgtgatcaccagaaaacattaattgatcgtgatgacaggagatagtctctctagccagaacctgctaatacaagtcctgatgaattgagaatgatgcctgaaggaagcagactgacgtggtgcattagtaattttaggcaaaagaagataatggtactagtatgtatattttttagtttccttttccattgctttgttttgcacaggctgaagaaaataaatgtaaacagcatattatggtggctcagggtggataataatgggacatcacttcctttgtttcagtgtgaggttgcccctgctatgtgacagctccaaggactaaagatttcaatccccagaaaaatgtcgagtcccagtaacatgtttcaggttatcatgattattatgattataggaggggaagagcagtgctggtcttttagaaagttctcatcatgaatgtgttctggagtgaacatcacttactaacagatgagcagcttgaagttgagtcaaacaaaacttttagtgtttgtaagggtcagggagccaggggacagtctgtaactcagttgtatattgacacagagaatgtacaaaagctgtgaaagcttccacttgaatgactgcggatggttgctggtgacggtcttggacagtaagggttttcttcggagttgtaggaggtgaagtcttcctatgggaaatttctggacaaaaatacaaatgaaatgacttgcaggcctcagtttagagtattgttggctttgtctgtcaacaaatggagatttgaacatgggagttcaaggggattttaatgaaattttattaaggagatgagaagcagggagtctgtgttgaaaattcaataaagggcttgttttccatctcagcctggataatctatgttatctctgagtaaagggggtaacaattctaacaacctggcttccttagaagtttccattctcatatagtcaccgaaggcagcagcactgtcaaataaacaaaggtttaattaaataaaaactatttaaacagagcagaaatattcttccctggctagtcacagattggacaattcaaagaacaaaccctggggggaaattgccaatggattactttttctgttttctgtctattgcaacgtttttctttctggtgtcaaatctcaagttgaattcagtcaattatctacagccaaaaaaagtgcataaatgtctcttctgttactgtttatatgtcaccactaaataaagcaaaattttcttctcagcttcttgccttaggattttataagtccaacaaaacaaataaaatattatgtatattctatcgtcactatgaaagcataaggattgatttagttatgtacaagtttattgccaaagtttttcttcgttgctaatgttacacttgctacaaaatgtattaaagaaacagacaatttgctaaggatttggaaggatttgtcattgggttaagtacattaagtatctaaggggtgtggtgttctggttatgtgtatgtcagtttcacatatttttttgctttcttattttagttgcctctataatcattttgactttaaaatgttttctgcagatcctttaataactgcaaatgtagaagtatggtgtaacaagtaattggtatgactaacactaaaatgtaatgggaaataaggatactattgtaaagaaaacaagaaaaacctggggtaggggagcagtattgattctctcttaggattcctaagattctctgtcccaacccttctaccatggaacattcttatgtggtctaagtgtcaaagaccagaggaactgggcagtaacttatcttctcaattttctctctgaacatagatattttctttaagatacgaaaaacttttaattgtgctcctgaaacccatccctgtcctgtctcagccccgttgactcttctttctgtgggtgggtgaaaagcctacccatctgcaaaggtagctctgaaactgttctggaaaatcctgtattttcctccacaaatgatcgttttagtttcaagtttatttcaggtacattaattctccccctcctcagacttcataacaaatgatcctgcacacgattagaataggaaaatgtaaaataaaatcgaagcatatctagttgcctcagcgactttatgcttatcactttcagtctgcattattctactaaaaataaaaagaaagatgaaaattacctcaggcgtttgctgccgtgcctgccctttggtttctgggacggctcgggtcccgtagcgccggcacagctgagattgccaagccgggaagagaccttgctccaggtgtagctgcgttttccccagatcacctgtccttttcccctccgacaaggaagctgtgatttttctctggcctttagaggcaaagtgattccagataagtagattaatgtgtagaatatctcatctgtgttgttccagtgcagccctttcagctttccagagccagttagacttgttatgaggagctaagtgattggctggctctggagctcagtttcatagattatagcccagcgtacgagaagcacgagtcctatagttggcgtaccctgaggcctgccagttcctgccttaatgcatatgtagtcgtaattgagttctgacacggccttggatgtttctgtcctaaatagctgacattgcatcttcaagactgtgtgagtaatcctgatattttttttttaagctcagtaaattaattacatgccctgggagggagtgattgtaagtagaaaatactgaactagcagatgattcgtttttaaggtgctatactatgtgtatcaagttcaagacgatgaatcttaaagcttctaagaactggcagggttattccagctttgtgccatgaatcacagtcaagctgcattttgaaggaggctgtttgatgcatttgctagctctgtttgttttatggggtcagtaaagtggcagaggtccaacaggagcaggttaaagcaggatgctgggatcaaagcttagagagcacttgagtcaggcaagttttaagttttcccacccccaagcatctcagtccaaaactgagagcaagcagcaaatattataataaatgctttggggacaggggtacacagcagatagggcacagtaacaggagaaatgtaaaatgatggcagcaatacttttgttcactgtaatctgcagccaattgaagacatacactatgaataactaaaacatttttatatgaacaaaaatgctcttcagtggttctgtttatgtggtagagggctgaatgaaaaaccatgcgcttgttgtaaaaaagccttataaaaagtacattaaacacatacagacacaaccataacagaagaaagtatgtggattggaatttgtgattggagcagatcaaattaagccagggaagccgttattaggtttgtatgattgctggggggtaacttctgttgctgacaaggtttaggataaagctggagcagattgaagtggaaaaccagaaaacatcagcatttcattaccttctatagcatacactgcagggtagaattaatactgagtatagactggtaaatgtgagcagtttactgtttgcttttaaatcattattgatttcccctagcctatcataaaaaataatagggcttttgcctatgaaattagtgcttagaaatatttttcttcctcccaaataatttttatactttttctcaatacagcacaaaggtaggtcattaaaaataaaggggttccttttcaagttgctttttgtctaatttttcctctttagacctgtagatacaaatgtatgtatttgtgctatgtataactctcaagcataaatcatttgaacagtatttaaaatcacaggctcctgtggcaaatataaacttttaatagctatagttggcaattacttgccaattcctataaaaataacattagtggcttatttttgattgcacctaaacaactggcatgatttagccagtaggagagaaatattagttgtgttttgcataattttgtgtttagatcacactggaaatacaaagttttgttgttaaaaatatttttgctttctgaaatattatcccctttcagatcacaccaatgaatgaagtttgtagaaagaaagaaaagtagccaacgtagactccttttctgtatcaatcaaatatatgcaaaatacatagatttttaaaaatgtaattttaatacattcctttagaaacacatttacttcatgaagaaacagtataatgagttcatttattgacccagaatagtgagttgatttattgagtttctgtagccatagacacgaatagtaatggttggctcattcttagctatacattcctaactgactgtattagtgggagaaaggagtgcatctataaaataaatataatcccatccctcaaggtggtctggagcccatctaagagtaagaagtagtagagttgaagctgctttatctgaatcagctcctgacttcaactcagctcctctttttccttaggtccatgtggcccacttggtgtagtattcacatctccttccacctttttatgccttcattgtttacattaccttgcttgggctcttattgagatgaatcacataaaaatgcttaattatcaaacattaatcagctgcctatataattcagaggatgtttaaaaccaaggctcaaggaaattctggtgggtgtatactaggagtatttacgtcttgcatcggtactttcctctgggacttccatcacttcagttcttcctgagatgccagagtcatatctcttacttgtgaaagaacagagctttaagaaatggagtctagaggtgccaggtgcccagtggacagtgggctgggggcaaggcatggtggggaaagcaaaaaaaatctcccaaacagcaatagttgatctttcttctatccactcctctcaattttctaaaaccatttttgtctaactgtggaagttcttttgcagataaggttctgtaaaactatgcatatctgccatagacagatggatttgacgaaagatgtatccaaaaaggaatgtatcacatcatgaacttgctaagtgttcatgaatacacactggcatttggagactattaacactacctactgaagcaaagacataaatccaaattgaagaaaatataattttttgattgaattacattttccagtgggtttttttttttttggtgaattttgtttttggaaaaatttgctcttccctccaacgtttttcctgtgttatatataggactgatttgatttcttcagcttgcccaagaatttaataattcttactttgtgttttcaaaagagttgctgtctaccttgagcatgtttttaaaaaagcagaacaaaacgaatgaaacaaatgtccctcttcccacagaaaaagcacaccaccaaggagttaaatgccctacatttctttaagtccctccttttgtggagctagacactggtagaagaggagctttcatttaatttcaagacaatcagtgattccaacttaactataactgtgttcctctaatatctgatttcaagaagcagaacattttggtgaattaatcttagagtcaacgggaccacgctcaggccatgaaacgttttctaagcctcagtctctatgtctttaaaatgaaaataatgatatatgttctggtattttactagattggtgaatatccacatcacaatgagaaagtgcttgtcaaaagaacattgtaatgtgtaatttgtaatgtgctgtacatgtacactattattatgactgtagctcatcacgctagggttaggactctttacttctaaaacatattcccagtaatggacaaaacttttgaagcaaagaaaatcttcactgtttgatcctaatgttatgaaggcttttggaccttacatttgtttaagctcccattgaagctcccattggagcttcaatgctgatccatctattacttgagtattaaaaataccgataggtttactgtgataaacgaatgtggcattgtatgtgaaaacatatttagtaaacttccatgtgccatagtcgtataaatattacatattgcaacaattatcagtatattaataaaaattctttgcaaattttcaatttttaaaatggaaagtatcagatatatttcttattgattggattgactaactttctaagctatgtttgcttccctcaaacaggatgaatgttcctgttggttaagctttctttccacttagatacagcactaagccaatagttagataagcattccttcacagcctacatttggagctgccaatgacgaagttttagaggacatattttcctcacaggaaaaagtgggttaggaaatttagactgacagatgttcttgggttttttttttttttttaattcctgtcttgactctcattattaaattttgctaaggaaataattatgtaggttttgaggtgatgcttattcctagtagtcttttcatctcagggatgcaatgaatggtcaaaatgaccttctgaatgatttgaaagatcaattagcagttttgaatcccaaatttttaggtggttctgcttcagaaaatcattatgctttttggaataatgtccatagctgcatcctacatttcagtggtttcagctcactgctgttatagtttgatgatttcctaacagcaatattggttatgctaaagcagttccccatttcacctgttgaaccctttttaaaagatagaagaaattatagaggaatcacaataagtaaaacgtattaaaatggagtggattatctccacttttatctcacacagctcacccagaaattcatgagagaactttctaggaatgaaacaatttcatttgtagtagtatttgaaaactggatctagggccattgacctgacttttttgtgcctttggtgattggataagaacacttcttcagtaatttaaaactatagtgaaataatgtttttttttaacttctcaataggaatttatttattcagcaaaaatcaggagttaggtgctagaaacacaaagatgaacaatacatggtttcctcaaggagcttataacctactagacatttatttcatgttggcagaacttttaggataattctcaaagaaaaagggttattatgaggttgctacttttctcctcaaaatattttctatgttaataatgaaggaatgaccaatctgtagtatatgcaaaaagtactgggtagaaatatattaattttcttggctgggtgtggtggctcacatctgtggtcccagctacttgggatgctgaggtgggaggatcacttaagcctgtcagttccatgctgcagttgagtcatgattatatcactgcattccagcctgggcaggcaacagagtgaaactctgtcccccacccacccccagaaaagaaacataaaaattttcttataaaattttactttttagagtctccagccttatttaattcagttaccatatttgacaaataaatggtggaaccaagatgttaccaggtttaagtttcatatacagtagaactgtgacaggaacctagagtacctggaactagaatccagatctctgccctttcagtttaggatgtactgacaatatatattgctacttaaaattgctaaaacaaaatttataagcatctatatattttgcagctaggacaattatctacaaacatgatatttaatggaagatatggtaataacatctgagatatacaattatgttataaaatctaaaatcaacaagaaaggaataaagttgtaccattccaggaaatacatttccagagctttagatatccttattagattctacatgttagttttggtgatgttaactgccataacatataaaatctgaaatcttgttgacttaactgagaagtttatttctcactcaatcaaagcctaaagtgagtattcttgatgggcagattcttctcattcattcaagcagtgttcttgtgactccactcttancaccttgttgtcacnaccagcttcctggtgtctgtgctttggcaaaggagaaaactcatagaagtctgctcaccttctattggccagagcttggtcacatggccccatatagtgaaagggaagctggggctatagtcctatttgtgtctgggaagaataaaaagttggtttggtgattgtcttagttcaggctgctgtaacaaagtatcatcaactgggtgtcttataaacaacagaaatttattttttttttacagttctggaggctagaattctgagattagtgtgccagcctggtcaggttctggtgagggctgtcttttgggttgcaagtggctgacttctcctattatcttcacatggcagaaagagggtgagctagctctctggcttctttttgtaaaggcacgaaccccattcctgatggctccactctcatgacctaattatcttccaaaganaccatctccaagcaccaacacattgggaattagatctcagcatatgaattttgggacgatatgaacattcagtcnacaacaatgatccactaagctatttctgccatacctttttttcttttctcttttctttccttactgttcttcagtatgtctatgtagaatctatgccttgtaaccaataaggtaatgaaaaaaattataatatttaccatctggaagaaattaggaaaatgattttacttttaaattcttgatccatatgttaaaaaatttccaaggctattaaaatatcactgaacattgtgattatagagattgctatgatttaatacttatgtcttatagtgaaaaagtagtcctgggatatttttctctctttacctcacccatcctcttctatgtcaggtatttgaatcccttgctttgtagttttataaaaagntggggagaaaatgaacaattgtcaaggaagatgaaatggctaatcaaaattcattcattctccatagttccttgggtattttataaactttgcagtaaatgctaacttcttattggggaaaactgctataaagtaagtgtacaggtaggttttggagaaatttttcttgcatggagttgagcaaatggtgcatctaacataagcttggtttatagtttctgtttttcagaagctagaagatttttctccactctgaacttctagggatcaacaaaagtatttatatcacaaataaaaaaaaacacagttacctctcagtaaacaattttttttcagattattctatttaaaaaatctctccaaatctgttaattttctgttaataaaacatcagtttcaataaaagtcataagcctgtcaaaccaattttagtcctttatcttggatatagtaggttaaaatatttttgttgggtgttaagccaataataaactcagctattttaacaaccaaattattttcctcctataaaccaaatttacaatcaagctacttaagaaataaagacaacaaatagaaactgttttaatcttcatatcctgacctaaaaaatagaagcacgaactcatgtcacattctcatatttatctgattagactaggaatgcctaaaaagaattttcccataactccatttacttgttgtttatttccctagctcattccaaaagcaatttaaaatacaacaccaaaagagtaaaatatcctcaatctgacatcctagcaatctttttattttggtgaaactgaacaataataataggcacttgcattcttcaccctgaggcactgaaaacactgatatgtctcagttttaagattctgaagattatattctatttaatagatattttaagtatatgtattatatttctagtctttgaactaaggcagtccacatataggtataaagtaatgcctcagcatagtgtagcaattattggtgcaaaaggttggtgcaaaagtaattgtggtttttgtcatgaaaatggcaagaactgcaattacttttgcatcaacccataactctgtggtctctggagccagactgcctgggttcagatcccagctctgccacttagtacctgagttactctggacaaactaattaatcttcatgtacctccatttaattatctggaaaatgggataacaatagtacctatctggttgggttgttgtagagattaagtaaattaatatacgtaaaatgctttacattttacgtatattaatttcaaaattgcttcgaatgatgcatatctcatagtgctttataaatgtttgtcatcttattattatttggggaactgattatttcacaaaatatattttctagatagctgaagtttattcagtcagtttcaaaacttctagatatagccagttttcatgggtctttacaaaaggatccctgtatctttgtttcttctgttttagagagattaaatggaatcttcctttggtgatactgattgaggtgatactgagataattaagaggacatgaagggatttaggaagagtgtttgcccctgcactaactggcccagactgctctactgcatcagccctctggcgatgttctaagggtttggacttcagtctactgcctatactagtacccttgctttaaaattcctgctcctattttgctataggctgtaagcaagaaaatagcctagtttctaaaacctatgtataaaatgagagaataggtgtcactcagggtgtcagttctcccctgagagtaaataagacgtgactgcattttttccttctgggtgagggttatgttttagagcaagggttggcaaactactacttcctgtaggccaaatctgttttttgtaaataaagttttattgtaacacagccatgctcatttgtttatatgtcatctactgctgctttcacacactgtaagggcagaattgagtggttcccgcagagaccatatggtctgtatagcctaaagtatttaatatctgaccttttacaaaagagtttaccaaactctgttctagagctttaaaattggacagagacagaaataaatgagatgttactacatttagtagtctccactaacctgcctattcaattatttgcagcaccacatcccttaaatgtattttggagaaacaagaatttattgcagtaggctatgttggataaagaacaaacagccctcagtagcacattgtgaatattaagaggtggtgaagctgtgattgtcaagccaagttgtttgggaatcttcattttagtatttgttgctctagtgtgatcagtanataacatgatgcaaaattatatagctttctgttgtgtgctgtagaatgttgttctagagatactaccagttggtagctccttttttcatgcaattattcaaagtaaatgtaaatatgtctgttgtccttttcttttacatgaaaacttcccccctccccaacgctgtaagattcagaagcatagtgtacagaaaaggatcttgaacttgggtttgaatcctgacttagtcactttataaaggagaaacatcaagttacattgccaccgccagcctcagtttccttgcctgtaaaacagaggtgggaatccaggctatgcttgccacaaaaggaggaccaaatgagactcagcatactagaaggctctacagcgcatattattacctgtgtctttaataatgttctcgatttggttcactttctcctcatacaaagatgtgtatgtttatggaaaagaatatacaatggattctgagtgaactaaaattgtcaactgcactgggtatgagtctgcaagcatgaaggaggctgggtgagaaagcctcttcaaacagcatatgtattcctctggtgtctgctttattattcacttctctaatgtgaaagtttatgctttagtgcagagctcctgggaaatatgcaaagaaaaaagaaaagataaccttggaggggaaaagaggtagtgcttatgccaatacaaaagcatgaatagaagcaaatagttgctggtttcttttagctgtagttctttaagtgaatctggtatatatacaagaaggtagttaatgttttaaagatgaaggaaggaatagtttcttttaatgaaaatagactctagtgctacggaaatgagaagtcccctgtgatgaggctagaggagaattactgaaggatgaagtgaacgtacgtggctccattttgtttttcttggaggccataaagaaaaccagacagcttactcagtgtaagttatttatacttgtaaaaaaaatcaccccatttttataatttaaggggatgctaacggttcagctttggattgcaattacattaaatgtattttctcataaacttgttttcaaatgttttaaaaagatttaaccagaaaatccagaattcttttgctgaatttgttttttaaatgctttagataaaatattttagaattatgaccttgaatttgaatttaagggactccttcaacctcctcttttaatctcctttgttatttggagggaattatccaagttgtntcagttagctattgttgtgtaacaaacagttccaaaacatagttttggattaaatggataaatgattaaaaggataatcatggaagattttcatgagtctaccagttggctggggagttctggttatctaagcagattctgattattttagcaagccttactcatgcattaggagttagctggcaagccaagatgaccttccttggtaaagtcaatgctccttcccatgtctctcatatccctccaacaggctagctcagggatgttttcacagtggtgtctggggtcgaagcatgggcaagtccagttgtgtaaaatggtagttggcaacacacatgcacttttcaagtctctttgtgtgtcacatttgctaacaccccactggccaaagcagtttgtggtggaactccgagtccgagtggaggattgtaaagttatgagtcaaagtgtgcatacataggaaggccatgagttgggccattaatacactcagtctaccagaagtcatttcaccttttttcctccatcttaacagcctcccttttggaaatttaacttttacatactgtgtaaaatcaaaccaaacaaacagaaaaatctcaacttacctggttacttttcagcactgtttttaaagcttggtcagggagtaagttgttattacaggctaaaattaaaattttgcttatttacttacacacttctcccctaactcctcctttttaaagcaaattgagtttaagccacaaactgttgaataatgaagttggttctttttcagttttattcatatctatccctgagctctattctgcctctaatcaatttctgtattttggagccgctattactatagcatttgctgggtgagtccgtggggttttgatcatgctttcatatgttcttgctgtttgatttcctctctccttaactccaggtttgcatttcttcctgcctattctacatgtcatagaggaacttcaaactggacgtattttaaagaatactggttatccactttgcccagtcacacataccttcaaccaacaaatatatatttgttgagtgacttccatactatttcaggcattagtaatatactagtgtaaaagtagacaaaatggaggccatcctagagtttataatctaatggggattgacagacattaaacaaatgtgtgaatacataatttaatgcttggccgtgataagggttattgagaaaataaagcaaggtgagcagaaagggaatgatggcggaggtgctttttttgattagtgttgagggaaggcttctgaagtgagggagtgagccatgacaatctgggcaaagtgtgctgcacgcaggggcattagtggatgcaaggctgtctgaatgacgtttggtgctgcagcagctgtacttccaatggaaagaagggtaggaaatgaggtgggggagacaacaagggaccagatcacgcaaggcctttgtagacaacagtaagctcgttacattctttctaagtgccatggcaatccattggtggatttggggcaggggagagacatggtctgattctggctgctgcgtggggcacaggctatagggagcaagggtggaagttgggaggctatgacagtcatggcaggggctgtgttaggagagtaacagtggagattgtgagaggatggcagactgtggagctctccaaaatgtgtttcatttaaagaagccaaatttagatactgtgatcagttctgccaagtcgagcctgtggagaagtatctcccaaagtagacccaacagacttccggtgacatctcagttacttttaggtgctatgtcacatgcatgaacttttaaattttaatagttactgatgattttaatgtggattagaaatatataaaacttgcatgtgaaaactatgattttacagttattacttggaatgaggaaaaagtattgagtgtagtgcagacttgaatgcagaaatagcaaaaatctctagggttatatctgaatgattggatttagaacatgctgacaggattatttgttagattgagtcctgagggatagtgaaggataactctggtaagtatgtaatcagatttagttattaccccttattgattatctactgaatgtcactctatgttaggcaccttctatangacatttcactcagctttccctgcaacgctatgtgatgcgggtggtaattgtctttttttttttttttttttcatttaacagatgagagaagtgaagttcatagagaataaatagcttgttttaggaagtctctgatttttcagatattacaagattagctctggtaaattctctgcaaacaggaacttagtctgttttgtacactactgtctccttagaacatagaaacatttctagtatataatagacattaatcaatacttgctaaatgaatgaaaggaaaaagaatggttcttgtatttagatcttactcaagagtggtatattttgttttccttattatagaatgaggtttaggaagtaatctcttggagtttaatggaaagccattttcgtcataggatgacttcctgtgtcccctaagtgcaggtttcccaatgtccagaccttggccttatatttttctccttattctccttgaaggacctggctcttctggctataactacatgtgcaatccccaaatctcagtgtttgatcctaagctccagttgtaggatgtataaacccactaacaagcctagagccactttagggcaacataaccttggccaagtgacttaattgcccttgagccttagtctctgtcagtagaaggaagagatggaagaagaaactgagccttgatttgaacaaaacctatgggcactagaagaaagaaagacagggtgcttagggagcataacattaggggggagaagacctagaaagcaaacaattgaatttctattccttttgagcacccttattttgttttctatctagaactttctaaggagttaaaaaaagactcttttacataagttttttcaaaaggcttaaatttattttttcttaaaaaaaggtaaagtattgaaaataaagccattcaagcatttagagtcctggagaagctctaacctgcagctagagcagcttcacacacatcctttcgctgccagcagcagctgcacagagcttgctggaaggtctgaggcagggtgtgacaaactgacctgactgaatgaaggggcttctggaaaggggaggagctccatacaggaacattgttgggggtaaggtgagcctgtggaggatgtctctcctctctgcctttccttgcagagctgggagctgtggagagtggaaagtgtgtctgaatgacttcgcatgtttagtgaagctcattgccagaactgcgacttcccctgttgccttgaatctgctgatcagccctggcagcacacgttttttaaattatttaaaaagggacaagggttataaagatgaaaaccacatttttaccagcctctgcaaactcctaatttggtgggtgaaggacacatcaatgaaatttccagtataaggagtggaggtaagtgctatagtctgaatttttgtatccctctcaaattcatatgctgaaacctaatcaccaaagtggtggtattaagagggggtttgggaggtgattaggttgtgagggctctctctccatgaatgaattagtgcccttataaagagtcttgagggagcctgtttgccccttccatcatgtgaggacacatagaaggtgctgtctataaggtatgagccctcaccagacatttaatctgctggtgccttgattttgaacttcacagctctcagaactataagcaataaatttctgttgtttataaattgcccagtctaaggtttttgttatatatatatatatatatatatatatatatatatatatatatacacatatatatatatggcagctcaaagggactgagacagtaagccagacacagaggtcaacacctgccttgggaagataaaaaaattccaactgggtggatctgagtgatgacttggaaagaataggattcaaattaggccttgaggcaaggatgtgactgatgcttatctttaggaaaaaaaggttgttttactctaggtaaaggaagtagcctcttcaaaggctttgaagcagaataatgcggcgggcgggggctggggtggggtcagggggcatggtacatcaaacagtggggagggtgtagagtgcatagtgttgggaagaacaccatgaaattggaatgacagaggtgaaagcatatggtagtatggtttgcatgccagatgagctctttggactttttgggttggcatggggagccattgacactttggtgagaggatctgaggagtggagtggcaggggaaggccatcatcagctctgtgtgtgccagggcagcaagatttgttagcttaaaaaaactttttgaaataattttaatttagaggaagttgcaagaattgtcaaaaagttttaggatattcttcatctgaatttaccaattgttaacattttgccacatttactttatcattctcttgttctttaacatatacatattattaagagcacttttctaaaccatttgaaagtaagttgcagacatcataccccattacccctatgtggtaatatctaatatctgaagtctgatctccaaactttattcaaatttcaccagttgtcccaaaatataggaggtctctttctccctttctttcttccttcctcccttgcttctctgcctcccttccttcccttccttccttcctttccttccttccttctttccttctttctttctctttnttttctttctttcttttttctttctttttccttccttccttccttccttccttccttccttccttccttccttccttccttcctttctttctctctctctctttctttctttctttcatctctctctctctgtctctccctccctccttccttccttccttccttctgtctgtctgtctttcttcagatgctcctcancttatgatagggttatgtcccaataaactaatcataagttgaaaatgcatttaatatgcctaacctatcaaatgtcatagcttagcctagcctacctcgaatgtgttcagagcacttacattagcttgcagttggggaaaatcacctaatgtaaatcatgtaataaagtaaattacataaatatttcatgtaatttattgaatactgtactgaaagtgaaaaaagtatccaaaatatggtttctaccaaatgtgtttacttttgcagcatcacaaagttgaaaaatcctaagttgaaccatcctaagtcagagaccatttgtagcctaggtgacaatgaaataggcttgagtggaagcactgacagtgagaataagacagccatttcagagttgaacacaataagatttggcaacaatgggctttagggtaagagagggagtaaagctggtaatgaggttgtagtttacaggattgatgtccttaaccaacaaggatctcaggaaagagaatcgaagtgcaagggtgtgcttatgtttcagatttttcatttaataataataattagatttctatagtgctttcaaaggcagaaaggcagtatgattggaggcagcttatggcagtgatcaagagtaggaactccggtgctagactgtctgggttggaatcaggctttgctgcttattagctgtgtgacctgggaaaaatgacctaagttggctgtgcctcagttttcttatctgtgaaatgggaattttaacatcgtttccctcacaggatcattgtgaagattagattagttattatttgtaaagtgttattatttataaagtattataagccattctgacatatagtaagcactgtatgtgtttgctgaatcaatataaataaacttattttcccatattactgaatcctcaccagcaaatctgtgaggaaggtactattattattattgctaattgggactcaggtgttacatggtttgcccaaaaccatataactatcggtaaaaatgctcattctgttccacctaccagactatccccgggctcgctacatggggatacctaataggccatagtaatgggctagtgtctcagcataggcatactttgggagtattgtgggttcagtttcagaccactgcaataaagtgaatattgcaatagggcaagccatgcaaacattttggtttcccaatgtatgtaagttacatttctagtatactgtagttgattaagtgtgcaaatagcattatatctaaaaaaagtacataccttaatttaaaaatactggttgttaaaaaatgctaatgatcactgagcctgcagcaagttgtaatttttttgctggtggagagtcttgccttgacattgatggctgctgaatgatcaggatggtggtttctgaatgttggggtggttgtgacaattgcatgaaataagacaacaatgaaatttgctacatcaatcgactcttcctttcatgaaatatttttatgtaacatgcagtgctgtttgatagcattttattcacagaacttttcaaaattgctgtcagtcctctcaaacccagttgctgctttttatcaactaagttaatgtaatattctaaatccttagttgttacttccacaatgttcacagcatcttcaccaggagtagattccatctcaggaaaccactttcttggcttatgtgtaagaagcagctcctcaaatcttcaaattttatcatgggattgcagaaattcaatcacatcttcaggctccacttctaattctagttctcttgctatttccaccacatctgcagtgacttcctcccctaaaatcttgaaccactcaaagccatccatgagaagtggaatcacttcttccaaacttctgttaatattggcattttggcctcctcccatgagtcatgaatgtttttaatggcatctagaatggtgaattctttccagaaggctttcaactgacattgctcatatccattagaggaatcactgtttatggcagctacagccttacaaaaatatatttcttaaataataagccttgaaagtcaaaattactccttgatctatgaactgcagaatgaatattttgttaaaggcatgaaaacaatgttaatctcctcgtagttcttcatcagatctcttgagtgactaggtgcattgtcaatgagcagtaatattttgaaaggaatcttttttttttggagcagtagatctcaacagaaggcttaaaaaattcggtaaaccataattaaacagatgtgctgtcatctagtccttgtggctctatttatggagcacaggcagagttgatatagcgtaattcttaagggcttaaggatttttggaattgtaaatgagaattggcttcaatttaaagctaccacctgtattggtccttaacaagagagttagcctgtcttttgaggctttgaaactaggaattgacttctctttagcaatgcaagtcctaggtggcatcttccaatataagactgttttgtctagattgaagatctgttgtttagtgtagctaccttcattgaaaatctgttgttcagtgtagctaccttcatttgttatcttagctatattatccagttcacctgctgcaacttcttcctcagcatttgctgcttcaccttgtacttttctgttatggaaacagtttattttattaaacttcatgaatcaatctctgttagcttcaaacttttcttctacatcttccttacctctctcagcccttgtagaattgaagagttagggccttgctctggattaagctgtggtttaaggaaatgttgtcactggtttgatcttctattcagaccgcccaaactttccctatatgagcaataaggctgttttgctttcttatcattcatgtattcactggagtagcacttttaatttctttcagaacttttctcttacattcacaccttggctaacttgcacaggagcttttggctgttcttggcttttaacctgccctcctcactaagcttattcattccgagcttttgatttaaagtgagatatgtaactgtttatttcacttcaacacttcaaggaaattgtagggttattaattggcctaacttttaatattgttgtgtctcagggagaaggagacctgaggagaggagagatttctgggaaaagccagtcagtgaagcagttagagaatacacattattcattgattaagttcgccgtcctatatgggcatggtttgtggcataccaaaacaattacaacagtagcatctgagatcactgatcacatatcaccctaacaaatataataacaatgaaaaattttaaatattataagaattaccaaaatgtgacagagacatgaaatgagcacacattgttggaaaaatggtgctgatagacttgctcaaccagggttgccacaaacctgtgatgtgtaacaaaacacagtatccgcaaagtgcaataaagcaaagtgcaataaaacagataagggctggaggctctggagttgaaagccctctacatggagatgatcattgaagacatgtgatgtatgcagncactaagagagaagctgtagaagaaaaagctgagtgttggagaatgttgcctatggggtatgaagatgaaggggagctggtgactgagactgggtaggagcagtcagagaggtaggagacagaacaggagggggtggagtgaaggaaaggaagaaaagtaagggcttaagaaggacttggccattctttacacaaacaaggcagacaaattcagagcagagacctgggatagtgatgagtgggtttcttagtgaccatagtgagaatggttcattggcttggtgaggacagatgcttatttatggggctcaggaagaatgggaagaaagacntggattttataaatgtgtgctattcccttaagcagattggcaataaaaggaaggaaaactttgaaagaaacagggtaaagaaatgatctgtctccaaaagaggcaattgtcttggtcatccaggaggtaaaggcaaaggcttgaagatgcaggaaatggtggggacgatggagagagctggcagggatagaatcaggagcatggctggagggattggtctcaggaagaaatagagacactgcttcaagattggagggaaggctgggcacagtgggtggctcatgcctgtagtcccagcaattttggaggctgaagtaggaggattgcttgagtccaggagttcaagatcagcctgggcaacatagtaagatccccatctttgcaaaaaggaaaaaaaagttagccagacatggtggcacatgtttatacttccagctacttaaaaagtaaccctgactcttaaaaaaaaaaactgaaggcaagaaagagactgtgtgtgatgacctatgacatttcatatgaaggaaggaaaaattgagataattcacctagaattgcctcaatttttgttgagtgggcaatgaagctgtttgttgagaaagttagaagtatatttgagaatctgaaagggcttgaaaagttaggatgtagactgggcatggtggctcatgcctgtaatccctgcattttgggatgctgaggcaggtgggttgtttgaactcaggagttcaagaccatcctgggcaacatggtaaaatcccatctttattaaaaatatagaaattagccaggtgtggtggcactcacctgtggttccaggtactcaggaggctgaggtgggagaatttcttgagcccaggaggcagaggctgcagtaagcagaaatcataccattgcactccagcctggatgacagagcaggaccttgtctcaaaaaaaacaaaaaaaaaaaaaaaaaagaaaaaagaaagaaagttaggatgtgtattagagatgaaaaaggggactgtccagtgagggaggaccagcatttggactggttgagtggcttggttctacaaggtattatcataggactttccttagtgactgatatggtttggctctgggttcccacccaaatctcacatcaaattgtaatccctatgtgtcagaggaggagcctggtgggaggtgattggatcttgggggtggatttcccccttgttgttcttgtgataatgagtgagttctcacgagatctgagtatttaaaaatgtgtagcacatcccctttctctctctcctgctctgccatgccaagacgtgcttgcttccccttcaccttccatcacaatcataagtttcctgagacccccaagtcatgcttcctgttaagcctggggagctgggagttaatcggacctcttttcttcataaattacccagtctcaggtagttctttatagcagtgtgaaaacggactaatagagaaaatgtgacaccccagaattaaggcagaagaaatggattgggccagtgtaagnatggcttttagtgaaaggttaagaatactaggaaatctcagagttcagagagaattcagttggagatggttgaccataggctgtgaaggcaagaggaggctgaacaaggttcctgtgaaatatccataatgacagagaagaaggaaagcacatttctggggctccaagtagcctcttagaagttggaaaattctcaagtcttaagttttaactttaaaatatttaaaattccagggctgggcctggtggctcatgcctgtaatcccagcactttgggaggctaaggcaggcagatcacaaggtaaagagttcaagaccagcctggcgaacatggtgaaaccccgtctctactaagaatacaaaaattagctgggtgtggtggtgtgtgcctgtaatcacaactactcgggaggctgaggcaggagaatagcttgaacccaggaggtggaggttgcagtgagcagagatcacgccactgcactccagcctgggcaacaaagcaaaaatccatctcaaaaataaataaaataaaataaaataaaataaaaaaatatttaaaattccagtgcngatctgttaaaataaagtagtagatgctagtaggtgattgatttctcagtaaatagacacctaaaatatatatgccatatttttccatgacaagggcctatactgggtgggggtgggctgggaatttgtatcccagtttaagaagactggaagaacaaagaaaagtaagggcaaaatcaactactgagaacaacgaaggggcaggataaattcaacaggagggaaagagtaggaaatgttgaaaaatttgagactggcagatcttgaaaatgagacaatcctagttgataatgagctccaaagtgtaatcaagaaatcttccaagtgatggagataaagagatggaggctgtcttgggtgatttcaatctcattgaattgctcctgacttagattcaatacaaaatttctctcttgtggtgcacagaaaaaatattaatgtttaaaaagatgcatttgtaaaatgttaagccagacatttatttttaaacattgtcttgaagtcagagagagattaatagagccattctaaattttcttagggaacatatttggtatctgcctcctgttgtacaatctctaagaaaagtgagagcaagaagaactataaaattgaaatgccaattgtgatatcaagtaatttttaaatgaatgcatctttcaattcattgataggataaatccttatttactttatccgtgagggtctctgtcttgaacaacaagcagccaatttgtggaattagtggctgtttcaggagggtaagtaacctctcatttatgaccatctcgttcctatgttttaaaataagattgtggacaaatacttccattcaacctagtagatgcattttggcaatggcagatcacccaaacaatggataacaatagcaaaagaaatgatatagtcagaagtctaatgttagccatttgttcctagagtttcgaaatacagtcagttcccaactcatgatggttcgacttagaatttttcaactatttttatgatggtgtgaaattacatgcattcagtagaaactgttcccttcctgttgaattactctgtcccttcattgttcggtgcagttgattttgctcttccttttctttttttttttttcactttcactgcagcatttaaaattacaagagatattcagtactttattataaagtaggttttgtgttagatgattttgcccaactgtaggctaatgtgagtttggagcatgtttaggtaggctaggctaagctatgattcttggtaggataggtatattaaatgcatttttgaattaatgatatttcaacttacaatgggtttattaggacataatcccactgtaagttgaggagcttctgtaattataatatcagatattgatagcttccattggtaagtaacttcaatatttcccactctttttttaaaagcttgacgagcatacaaataataaataattaatgtttctagtagaaaagaggtaagtaacaggaacagaaatcttggaccatcttaaatgaaccaatgggaatgtcaccatgcacatccttccaaactttgtttcaagctatttcatgtcaaatttatgcttatacaagtggaataatatgtatgttatgtcttatgttttaaggaagtcttgacttatggagggtgagcatttagtctcacttttaaactaacttaggaaaatgatctaaagcatagtgaaaagaacaatagagcaagaggaatgaggtgttagtttaatgaaatagtttagtgaaataatgccaaggactaatatattgaagagatatttctttagcttggcatatttcaggaagcaagcgggtgcatttaataaattaaatttttatttaattatttatttttatttatttatttttttaaagatgaagttgtgctgtcacttaggctggagtgcagtggtgcgattataactcactgcaaccttgaactcctgagttcaaacaatcctcccgcctcagcctcccaaatagctgggactacaggcatgtgccaccatgcctagctaatgaaaaaacaaaaaaaagtttatagagatgggatctcactttattgtctaggctggtattgaaatcctggcttcccaccatcctcccaccttgacctccgaaagtactnggattacaggtgtgagctgccatgcctggcctggccttgcttttttattttttagcttttatagctccatatcctctaatgccaccacagtatgatgagtggaaatttgggtaccatgtttagcactgattttctctcttggcgaggaggcaccactatcacgctatgttgagtttttggcagccaagatcagagggactgtcttgtaatggccccatccctgagatctgtgggaataacacaggagacaggcactgactgcttccaggggaagcaacaatcagtgcactgaatgccttaccaagctgagtatcgctgaacttcaaaacagtgccagaggagtagagtttttttaacttcctctgctctgtcaacagctgacttagctgatttttgcctgtgatgataatatccagagtgatgactggattctcataatctgcttctctactgttaaggagggatttttacctgatagcatttctctaattttacttattttattaattcttctatgccaattacttataaattttggcttatttctgatcacactataccatttgtaaaacatgaaattcaagttgattgattgctataattttctcccatccatattctggatgaatcaaagatgaggctggcagtgtttctttccctttgaaaacacttggttcattttcacaaacagaaaaattacatggcttcctggagacattgatttgttcttctggaagggttggacctccattgagaatcactaatttaacaaaaagcccacagatcattgtatgagtgtgtgtgggatggggagggggagagagagaaagaaggaaagaaatgggttaaaatttcattttaaggaatcattttattgttggattagaaactaaagactgtccataaaaaagaggaaccattctaaaattttcataacttgctgtatgtgtgtattttatttcttaataaagctcaagtagtttctcatgaaagtcaatggatagagagccatttcaggacntgtttgaattggcagttggttggagtttggccatggcaggaaaggacagctgtttgttgtggggccttgtctccatggtgttgggcagcacatcttcagctctttctgggaagacctcaaagtaggaatagaccaagaaaaacagcaagagggcatgactgcatgctggtcagatggaattcagcctgtactgctctagcagagcttctccaggggttagaatgttttgcttttatagtcatctggattgtttgtttactaagggtagaaaggtcccagcctcacccaagacctcccgattcagtctctgtggggagctgcttgggaatctgtatgttagagaagctcccaggataattgtgatgtgtggtcatgtttaagagctgctagtgtaaataatggtgaacagtagcactggctggaagcactgtagaaattgtgtgtgtgtgtgtgtctgtgtgtgtctgtgtgtattgtgcaagagctatgagataagatcaggctactggaatttgccaagaagcagcacgggagacacattaactagacgccaaggatgtggccatagactttcctagaaactccctcatctagggtgtgcacgtctggattgcactgactagtcctgattaaatcctgtatgcataggctcagtgcaggctgggctccagaaaaggccatccacaatgttttcttttaaaattccatatactatttatctttgattttctacctcctgcaggaatccctagatccaactttctttggtgagtttgcaggggtttctgatggttctcttgtttcacgggtttccttcttattttctactccttttatttggaatgtcaacctacaaacttaaaagattgagcaaactttgtaggaaaactacagaagttggaaccacatatgatgctttctattatatgcccaaagtctgttgtatatgatgaaaatgaggttttatttacttcttggtacaccaaacacaaacactctctaatgaggaaaagaacccaatgagggggaaaatgctggatgccaatggatggcaatgatttatggaactctgggctcagtggtagtgaatgatcatcttaagggaagacactattctacagttcggtgtagctgggatgactttatatcctagtttgcaagacagtcctggcctcacctgttgagctggtgtcccatctagttaagatacctttcatgctccccagtgtcctggttgagatactccgtttatgtggtcaccgtgaggataggaaacagagagaggagatttttctttggatcactgaatagtactcatttcattatatgatttatcccattccaggctcacccctaacatttgagggcccaggacaagacccccctattccacaacctattccttctcttcttgccctggctccactgtgcaactggaggatccttgtaagaatgtgtgtgggtgagccagcctgctcattcaactttattcacacccacatccactagctgcccatgaacacccctcaggcctaggggtgcgcacacctgtgagttgatctgcttcgggagggtgaagacacacccaggccctggaagctggtttcggaccacttggggcaggaaattcaagggtcatgagtacttggggaagagtctagaagggaagttgtncctgcaggtgggtatgtatcacagccctgcagactgctggttccatggagaggcatggctggagaagggcaggagagggcattctgaagcatcagccccctgattagggatacctggccctagagtggtcctggccttttcactcctgcttttcagagatcctgcttctaacacatccttgagcatctcagtaaagcaagcttcctatgccattctgaagtgtttgggttaagaacgtttctcatgtgaataatgcttggtcaccagactgaggtccagcgtattcttcatctggtctgatagaaatcccttgtctttaaatgtcatatatttaaggtaacaactctattttgtaggttgaaacaaaaacttaaactgtatcagttaatgtttttaaagtcaaccaaagggaaggcacctcttcccagtgtgtttcatcaattgaaatctggtgaatgtttttttgtttgctggtatgttccaccatgtgtgtgagcatgaaggtaggaaaactgtttgctcagccattccctctgtggtttggtttgttggagaatcagtcaaatggaaaggctttcctctgatgtgattacagaatcaaatattttataattcccagatacttctgaatcttgaataattattaaagtcagtgaacactttctctttcttttccttgactccctttggattgaactagcccgcagggcaacacaatattatttccctgggctaggtgcactttcctcttcgtggactattgggtgcctgtagatagagtccctgtgcacagcaggcagattgtgcaccgcatagtcctggaggtaaatttcaccaagagtataagtgggattgtgcaaaatggtagccctgcctatgcatgtttggggcagggattccccccaactgtgtatttcctgggaggcctgattttcctcctctttctgtcacccatcataagcatatggagaagatggatgtttgaagggaaaataatgttattttctgcattttctcccattttttgagagcactcattctccttctaatattaatttagatcagggaaaataaaagccatttgttaaagaactaactattatataataaattatcaaacaattacgccaaaggtatgtttacaaactcctgttctatcttggtgggttgattagcttccttggggggtccaaacagctatggcttttccatttttataaatggttctgcatttataaaattaagaatggacatttatgctattaattaagaatggaattaatagtgtaaagggatccttcaaatacccatgtgttattgctcaattttaaccaataaatcttataccagagtgttctgcctgcttccggatgagcaaggagacttgtggtctggttcttggacttccctagcagcatggcccccaaatgccagtctccactcctgcctcaaaagaagaaaccaagaatgcctcctgctctgggaccggaggagacattggcctctgcaggcttgctgaggaagggagaaaaagaacagcaagaagcaattgaatgcattgatgaagtacaaaatgaaatagacagacttaatgaagaagccagtgaggagattttgaaagtagaacagaaatatgacaaactctgccaaccattttttcagaagatgtcagaattgatcgccaaaatcccaaattttggggtaacaacatttgtcaagcatccacaagtgtctgccctgctggaggaggatgaagaggcactgcattatttgagcagagttgaaatgacagaatttgaagatattaaatcaggttacagaatagatttttattttgatgaaaatctttactttgaaaataaacttctatccaaagaatttcatctgaatgagagtggtgatccatcttcaaagtccactgaaatgaaatggaaatctggaaaggatttgatgaaatgttcatctggaaaggatttgatgaaatgttcaagtcaaatgcagaataaagccagcaggaagaggcagcatgaggaaccagagagcttctttacctggtttactgaccattctgatgcaggtgctgatgagttatgagaggtcaccaaagatgatatttggtcaaactcattacagtactacttggttcccgatatggatgatgaagaagcagaatgagaagaagatgatgatgatgatgaagaggaggaaggataaaaagatactaatgaagaagacaatgaagatgaaggtgaagatgaagatgatgatgaaggggaggaaggagagaaggatgaaggaaaagattactagaacactgataggttccaactttcctgtttaaaaatttttctccagtccctgggagcaagttccagtcttttctttttcctcttgtgctctgttgccctgttgttgaggtctctttgctctacaccatggttctcaacttattgcagaatacaatgggaaaagtgtctctacgcctttctgtttgaaattcatttttatccctttctgtctgaacaaaaactgtatggaatcaacaccaccgagctctgtgggaaaaaagaaaaacctgctcctttcattctgctggaagctggagggtgctaggcccctgtgtagtagtgcatagaattctagctttttccctcctttctctgtatcttgggcttagagagtacacggtgtctctatgtgaatatggacagttagcatttaccaacatgtatctgtctattttctcttgtttaaaaaaagaaaaaaactaaaaaacaaaatgggattatagaaggtcagcaaagggtggatctgagatgtttgggtaggttaagtgggcattttgacaacatggcttctcctttggcatgtttattgtgatatttaacaggcatctttgtagtttaagatgacacttttaaaataaattatctcctaatgatgacttgagccctgccactcaaagggagaatcagaagaacctgtaggatcttatttggaattgactttctctattgtaattttgttcctgcttatttttaagttttctttttgtttcactgtaaaggaaagatgatgctcagttttaaacgtgaaaagtacaagttgctttgttacaataaaactaaatgtatacacatacacacacacacaacacacacacacacacacacacaaacttataccaaaatcacaccactttagttagttgtccactggaaaggtgctctttgttttcgagcttcaaagaagctcgtcttcttttatttgactgtcgctagggactccactgagcaggaatgactattctgatatttgcttgttacatttttggttttcagaggtggcatattgaggaggtgcacttatggattgcagcataagtatccatgagtccgggtgtggtgcgtgtgctcactcattatcttgatgtgctgctcactaccacgtctctcctttacactattggaaactttcattcttaataatttaatttatccctagtgactccagcctcccatgacagactaaaaaaccagacttgatgaagtccagatatattttaattctcttctatcaagcccaagggagaatttcttagcgactatgctgacttatgtcttgaaaaaactttaactttgggaattttgatgtataatgaagccaggagagggagacgtgtcattccaaaatgctgcgaatagaatttaagcaagcaacatgacacacattctttgtttcttttgcttttttttttttttttttttttttgcaatgaagtctcaccctgttgcccaagctggagtgcagtggtgtcatctcggctcactgccatctctgcctcctgggttcaagtgattctcctgcctcagcctcctgagtagctgggactacaagcatgtgacaccatgcccagctaatttttttgtacttttagtagagatggggtttcactgtgttggccaggctggtctcaaaatcctggcctcaagtgatccacccgccttggcctcccaaagtgctgggattacaggtgtaagccactgcacctggccatgacacatattcttagctattctccaaaagggagaacactagaaaagtggtaatttgaaaatagaaactgtccagtagcaactggatggctcatagctccagtggttctaataagcgctcagtggagagtctgatacatattaggtgctcaagaaaatatttgttaactgaataaacaaatcaatcggatcttgttcagagaaattccaaagcagagaatatctgccacaagtgctcacatcaaccatgcctattaagcagcaccatgttgtttgctctcgcagaaagggatttgatttggcatttgctgaaacaggcccccatcttacagacggcattgagactcggaagagttaaataatttcctcacagctactaagcactagaactagaataagaatgtgtgctttctgactctgagtctaggattctaggacttcaagggtttcctatctttttgaagtcatggggcagaacaatataaaggaacagctggaaaaactgaaatgaaattactattcactcttacataggaagaataaagataactcttgagggccctgatatattatagtaataaaaacaagactgaggtagcagaagcacatggacatgcagggaacacttccaaacatccttcaaaaggcctaacttctaaggacaggaaacatgaggaagcagagaaggaaggaaatgtgtctaaattcttccaagctgtttcttttactattcaggccaagccttctatctcttaaatcaaaatttcagggaaagcttatggcagatgagacttttgggagtacattagaaaacaggagggaaaaaggccttattactcactgatttgtatccttgtgttattttataatattattaaagctctttccatgttatatagattctgtctctcagctgtactgcaaatctattaggacaagtctcgtctcttttatgtattccttctactgtgtctatatgtggtggtctctcagtcgagcaggctgtacagtttattcgaagtgttccaaggagcttgtgtgcctccactgctctgacctcatttttgcaatgttaattaagttgggtagatgacctattcgactgataacactcactagctcactagtatatggtaagtagtttattctcttagttagttgaccgtgaccagattaaagcccaaaaagacaagaaaaaaaatcaggtggtagagagtggggaacagaggtataggacactgttttgggaaagtggatcttcttgtgttcctacagaggataactcgggcntgtcaggatgaggtattacaagaagagagaacaagagnggaggctcaccattaaatttggcttctggccttgggtcagccttgcatgatgttttgtagactgagagtaaggaaggagaagttgagacaaaaactttactctctgtttggtcactgagagtaaaggttctctttgtgctagcttattcttaagcagtatgcatgaggcatttaggggtttattgctgaagaaaattcatcctcttgtgctaattgggcagggattccaagggattaaaaccaaaatcatttgaccacctgagttacagtaattttagagcttaggttgtttattttcactgtatagcacaaccaaatactattcagtctggctgcatggaatgagatatggctaattagatttcctggctaacccaggttaaggcagaaatgccatgttaacagtagcacccttaaacctggggaaagaggctcttgcctcgtgtcacttgctttagagggccctactggtcttcctccactgtgccatgccttatggggagacgattctgcagagccatgtggatattgtcaatccaaagcaccccattccctcttctaaaccacttggtaccccacaattcctacctaagtgatcccaagatgacttccagggcctacgtgggtctctcttgagttctcatctcccgaaggtgaactgtaccacttgtgttgagcactcctaggaccaaagagtgtggggctgtgcatgaatcttagatgtttgggctgagatgtccttgggggtgtgtgcaaggcccctcactgcagaaaagaactgaaggtggggaagagaagagaagggagtgggctactggctggagaaccctggctccaaaaattttaggcatgggctgacatttctaactctccagtgggaaaccatttaaagcagtcaacacattgactacgaagtgcaggcactactttgagtaactagacttgatcgcagaggtccttgaatggcctcctggtctgcatgtgtaacaacagtggttattgttctctggactctaatgctgtaggtactagatgtgactgttctccagagacattcctagggagttgctaatggtggtggtggtaattgctattattatttcatgaacattgaaatcttttatttttttgtaaagttgtctccttgaatactggactgtaaaggtgtgtggatgtgttctagcaaattgagaattgtagttaattgagttctggttatttaactttttactgtagtttgtacttgttgcttgttcagagtctaggcaattttacatgggcttattttatcctttctccctatctccattagtcttcaagatcaggaaaatgatttatgtcattttaaaatagagccttcctctgtctctcattttccttcttctctctctctaaggtatattattgcctactatatcctgtgccctgtgctggaatttctcttgtgctaatttttattgataacatatgatggcttaaaatgtcatctagtgtttagtaaattcataatagaaaataactttgttccctcacaaatttttacagacatttaaaattagcacttcaatatccaagtattttgctttttcttttctggagagaaactaacacctgtaggtatttgttgacatgcaaaaaatgcatgcaagaattttaaaattttataccctataattggttgtatactattaattagacctcttctttagctctcttactgtatacactcttctgttttcncaaattctctcctctttctctaaattcctcaccctgttccccaccctttccctgccttgtctctgggtttttgtctctcttgcctcatttttccttctttctctctcactttcttcccccaccccttctctcttgtttacactccccgctcatgtatgtgccgcttcgtctttgtgtttatatctaccaggggaaagaccaaccatctttatttttaaattttattttactttaagttctgggatacatgtgcagaatgtgcaggtttgttacataggtaaatgtgtgccatggtggtttggtgcacctatcagcccattacctaggtattaagccccgcatgngttagctatttatcctgatgctctccttcccctcactgcctcccaacatgccctggtgtgtattgttcccttccctgtgtcatgtgttctcattgtttagctcccacttacgagtgaaaacatgtggtgtttggttatctgttcctgtgttagtttgctgaggatgatggcttctggcttcatccatgtccctgcaaaggacattatctcattcctttttatggctgcatagtattccatggtatatatgtaccacattttctttattcagtctatcattgatcggcatttgggttgattccatgtctttgctattgtgaatagtgctgcaataaacatacgcatgcgtgtatctttataatagaatgatttataatcctttgggtatatacccagtaatgggattgctgggtcaaatggtatttcaggttctagatccttgaggaatcaccacactgtcttccacaatggaaccaaccatcttttaaagtaacaaatgacatctaagtgtgaagtccgaagtcaaagagctagagagtcatacagtttcagagttgtcgcagttttgatgattgattctctggcagggtcgtcctcattttgtacctgaaaatatagttctagtgaattatatcacttgtccaagcccacacaatgaccaggcttcctagccctgatttatcagtccagtccttttcttaaaaatagtttctgaatatatgcaggtaaaaataataaataagccatcataagttacagacatgtatgtctgcttctatggtgccaaggaaagaaaacaaggggaaggcatgaacataaaataacacaggtgcacttatacattgtttcttcaaaagatcatgaaaggatagcttagaaattgccagtaagaactatgacaaacaagctcagacaagttactgcagagaggagtgtacttaaagttagaaagcgggagaagtacacttgtcaacaggcagaaaaggaggagctatggaccttacaattggaaaatgtgattaaaaaaaaaataacgaagctgatccttcttgatttttcttgttttgaaatttatggcaaccagtacaacaaacctatttgaatgtataaattaaaattagtatactgtgatttacttgggctaatataaatgtaaaaccctttaagctagaccagctgtaattatattcccaaagatttgatttttatcattatttacagctaataagacatttatgatctctttttggttgtctctgttgaagcattgttggcaatgctttcctgacttgaagttctcatgtgtgttgaaatcgaattaggaaaatgagtaagtaaataacttatcctaagagtataatctctcctttgtgacataaattagaaatccattcacatctgtggaataattcccaggtttgcgactacacaatctgatatgcacaagcaaacatgccaatcttttctcagtctaggagaatttggtcactttctacttgaacaaaacaagctatatgtgcttttaaatagatgtatcattttctcaaaattggattataaagagctgatctgagctgcaatcagatggataattaaacagcaaaggtaagaggcttctgactgcccatgtttacagtgttaattgaaaaaataaaaatatgatttttaatcctaaaggtaatttgaccaatgcacatgtacaatgatgtaaggttctctcactttccattttaatctcaggattgtggaggcatttgaacctagctttctcacagagaatggaagaagtttgactggagaaatctggccacattttacgtttttctggggtgtgtatagttgaatgaaaacatgaagatgctacttttaaacaattttttaattttgttttttcttccttcagctatgatgctttattgtctcagatctgtttaatcacctggaatactttttcgagtgatttttaaaatggcaagaaatgttcccttttccataatgtagctgttgcctctgaaatgccataggtgtttgcattttttaaatcctcatttgtggcagttattacgttttgcttcatgttatggtaatttggcatgcaaacatatcttttgtaccaaattttaaactctttgaggacagggttcatatcattgtcttctttaccctgggcttttcactgggttggtgaaatgtttgtggaatcggtgaatgaagataagacatacattgtcttctgagagtgggcagacatgtggcgggctattgctggataatgtgctcataatatcctgcagattaatttggttctttgatggaaaatgaagtgaaaacatgcatctgcagtccaaccttttcccaatgttattcaaaatgtaattcaatgtgatcaattacattgaaaataattgagaaatgagatgacacttaaattagttgaagacaattgtggattttgcccttggttctttggataagtaaacttttagtgttttctcagagatttacaaaattccaggggctgtgtattcttgcctataggacatccaaatcctgaggcttttcttcttatcatttctcatttaactgcttattaattctttccaagagaaggaataagaaacatgaatttttgctgttaattgaaccatcccttaaaactgtttggactgtcttttgggctattgagaaaaactatttggtcacttttcctgtttttttgagagtccaggtagaagaggtctttattattgtcattacatagttcataataatatttctgtttcacttttacgtagcataacttttcaacaaacctggcaaaacatcatccaggcattctggtcagtaaagatcctgtatcagttgtgctgtaagacattattgagccgataatgtaactggtccagtttcccccttttgtctctgtagagagttcggcagcatagcagagggtcccatggaagtagggataaaagggaattcttctttggcttttaaaaatctctcaactccattcaaacttctgcaagttttcctccttgggagatatggagtggttccaacatccttaatatcagttgccttttggtcaaattccacctttaatcccttctaagaatgggaaaataaagacatctattatgacgtcctaaaggcctgtagttattgagagagcggccaagactagaattataacttgggcctctgctattatgaatatattgcttgctgtgaactcacttggagtaaacttgtgttattatagaagtagcaaagaggccaaaaaagagacaggggcaaaaagacatgatcatcacaaagaaaagataaatgtttgagctgatggatatcccaattttcctgacttgatcattatacattgtgtacaggtattaaaatatcacatgtacctcccaaatatgtacaactattacatgtcaataaaaacagtttaaaaagtgatcaaaaacagtagcagaaatatattccttatgtaattttcatcgcatttgagcatctaggatttttgacaagacactgggcttccgtctaccatagggtgcttaggaggcctagtgatctccagaactgtggggtgtcagttcaagagtctgctccaagaatacattaagtgcttacttaatgcagagcactatctttaatgctttgaagattataagttctatttttgacccatcttctatgttgggccatttatttttatgatttttgcttctgctttgtcatttatatgtaggcgacagtaatagtaatggcctggtaaccttacagggaactgcaggttgatggtggggaagcatcttattctaatatacccatataaagacataaagatagcatttatatatttgtagtcaaatcattggttcatcctattttctgcagttgaagatagatatcaccatgtatatggccaattatctttatccagttcaatttggccaggtcaatgaaacttgtatttatgtcatactcttgtgtcatgggagatagaagaagtataatagtggccctaatttacttttggtaaaattgaggttaagtgattttcccaaatttattttgatataaagtaaattgcagatacaagttttttggtctctaaccttgtgttatttaattgttccacaaagaaatgctgcatattaaaattatggttttaaatggctcactcagcccttttgtccctcccttctccaagtaaaacaactaacccctatttttcagtttgttgtgaattcagtttgtccaaactaggctggggataggttaattaaataattatatagtgattaacatggggttagaatttatgtcagattggggcaaaaccaccttttgaatacctagaagatagtgaaatgtacttaatactaacattgtcatgaatatcaatcacaggtttagaagtcttttgatatatatgagctaaatatggggttgaatccccaccaatcatatcttaacagatttttttaaaaaggtaagtatctgaatcagctgctttattttatttgtctctttctcataaaaatgacaataaaattatggtatgtgaacttctgattatttagattccagttaaacaggattttactttagtttctttttttttttttactgaaaaaaaattttattgacttgttttttggtgtatatagttctatatattttaacacatgtatacattcatataaccatcaccacaatcatatgaaaactcttttataaaccctcaaactcccacatatgacttctttttttttctttttatttatttattattatcatactttaagttttagggtacatgtgcacaatgtgcaggttagttacatatgtatacataccatttgacgcagccatcccgtcactgggtatatacccaaaggactacaaatcatactgccataaagccaggagaatttcttgagcccaggagtttaagaccaagcttggcaatatagcaagagcttatccctaattttattttttattttatttattttttattttatttattattattatactttaagttttagggtacatgtgcacaatgtgcaggttagttacatatgtatacatgtgccatgctggtgcgctgcacccactaactcgtcatctagcattaggtatatctcccagtgctatccctcccccctccccccaccccacaacagtccccagagtgtgatgttccccttcctgtgtccatgtgttctcattgttcaattcccacctatgagtgagaatatgcggtgtttggttttttgttcttgcgatagtttactgagaatgatgatttccaattattatgaagagagagaataatggtttctcacttttcaattccatttagaaggaggttgtttctttcagaacaccaaatgaagctttctcagtggccatcctataggacctttgcacttgaatctctggtttctgaatttgggacattttaaaatcctaagatttttccaggtgatctttaaaaatgggatctagggagattttagcaaattaatggtttctgtgtttaactcttttaaaacatattttcatgatcgtgtgtgtgtgtgtgtgtgtgtgtgtgtgcgngggcagttgggggggtgggtgaagggggatatggggagaacaaacaataaccaaagaaacaatagtggaacttaaaaatattttctactaacttatttgctaataattattcaggcagctttatgaaagctctttggaaattctagaagtgtttccatttcaggcttaatatatttggatcataaataaatatcagataccttttggaggcattagaaactaaacattatgcaaaggctaccctctgttgcgtcaggagcttgaattgttttcattaaaatatctgctatgaaagcactgagattagatgggatgctatcaaatgtcagagatttgtattcttggtagaaactgagatttcattttccttcatcccattctgatgctggcttccctgaagcaacactcctgttccagatttgtatgcttgaggtaagtcagaaaaggaatttcggtgaggcatgagtttgttgatgaaacgtgggggaaaaccaaatggacatcttcagaatgaaagtgtacgtctttgtctgtctgaatgtgtgagaaagaagaacactgaacacagtctaaacctcctgctggtgtgattattgagtagtgttgatggccaaaatatgaatgaaggtttttctgttgcaaaatgctttatgttatgtgcagggcagacatctgtgtgcctgccttaaatttatgaactaataacattctgttccaagaaatcctgtcaggtctttaacggtaccattttgttctgagttattctggtaaatgaatgattttgcttttaagtaattattttttgaatttttaaatataaagtcacatatggtttaatgtatggagaggatgcctttatcatcaatgaaaactttaagaattgactgattgcattttattttaacaaaatatcattcattattttcttctatttggaacagatgtaaatgttccaatctattttggattcaaatgaattttgaatcaaatagatttaaaatgaatctattttgaatcaacaaaatagattcaagcaagttttatgagtgagattacagatgaatgataataagcaaaatcatgagaaaacccaacccaaataattgagttagactatactataaacaaagtaaatttaaaaacatatatcctcaaagaactgtggccagtaagatagatactctctgaggctaccctcctagtatagtaacggtaattctgctgaaaccaattaggcactgttgaaagcaacttctcgctgccgatgaagggactggatcctgtagcttggtgtccttgtcaagtcctcagtgtgtactcagcttgcccctgctaatacacactggtcttaaataaaacagagtggcaaatatttagagtgagttttatgtgtctttgggatttttccttccccgccattggtaaatagcacgtttcctctgcagatctgtgacctttgagataacttcccttgttaaacacacactgatttgtgtgggtatttgttttctttcttttttttttcaaaagctattccttcttttctactttatattcagttgctttcaacacagagtaaagtcttctgatgaatctcttgtctgtagttttgaaaggaggggagaagcaaaggaattagcaatcacaaagataaacctgcaaaggcaaactaagtagaaacatgtttttccgttgcaaattatgcttaactactataggctgtaatccctatgctgacatatctcagaataaaatgtaagttgcttgagatgctattctgaagcatgtgatatggttttattgattgataaatttatccatatgatgatagttgtagattttcagaggccccatatggaccatttgaaatgaaaatgttatattggcaatggatgagaacatgccacttgccctgctccatacaaactttgattcctagcaatcagcacatgttagagagctggaggccacggtatggtgtgcaagtgctcctgtgctgaagtgacaccagaacaatcaccacattgccatcaggccgtccatctgaggtagggttttccttcttgtttcaatctttatcattcctggagaatttgccaaggcccccagggcagtgctgaggcctccagcgccccctacaaatctctttttctgtcccttcaacattttcaggtctaactacctgtagttttcctctctaatttctgggccaaagcttggcagggggcaggcgcagaattaggttgaagaggccagtatgagcaggcataccaaggtccattgtgctataccagaggtgttacattagactaatgaagggattatagaaacttagctctccatctgaattctcttattaacacatcactgtgaatcagcctgctgctttcggtgttgtgtattttttccctttgttacttctgttactgctaacgatattggtatcatttgttgtatcaatgcaactgacttgtacttcaaattaatatctcaaccaacctagaatttcttgtctagctatggtaggtagtatggggtggtagtggtgttgtctcaggctagtatatgataatatgattttgaagtctgttttcccccccatttaacgaactagtgtgaacatctatccatgccttttaaacacttttctccaagataattttttatagttttttaatggttaaataacattaacttagccaatgaaatttaaaatattttgctactgtaaaaattattgtgtatctcctggtagttaaatcaggattatttccttaggatgcagagcttgtatgttaaggagtatagttattcataaaggtttgatttttttggccaaattgctctccagaaagtttttttccccttcagtttattctcctaccagcagtgcatgagagggcacattttcccgtatcttaagtagtgttgttttctaaaaatgttgccaatctgatatggggaaaatggcatttcactgtggtttttctgtgtttgttaagtcactagtgaggttgggtagttttatcctttgcaaattgcctatcaatgttccttacttatttttcttttgagatgcttattttccaattaattttactgacaatttttatatagtacagatagtaatccatgtgtctataggttgtttataatgtaaatatttttttccaagtttcttagtcactttttgactttttcccttgggtatatttttacatgagaagtttttgtgcatgtgattgagtcttttttaattgtggtaagaacatttaacatgagacttgccctttaaaatgtgtttatgtctataatacagtattattaactatgggcataatgttgcccagcaaatctctaggacttaatcattttacataactggaactttataccctctgaatagcaaatccccatttcccccttccccagcccctgggcagtggttgagtctttgatgttttccttttaaagtttctgcctttggagttagtttagaaatgacttcatcatcccaagatcacacacacttttcctacattttcttccagtttctttattttacatgcaaatcttaatccatctggaatttattttgttgtataggagtgcaagaatttaactttatatttttctcagatagttttccacttgccagtggaataatgatttgttgaataatctatcctttgctttttaagttttaccttgaaaaaacataatataaaattttggatctagttttttaatataattcattgatttctctttttgttggacagcataacattgttttaattactgtaatgcagttaaacatctgatagcttgaatcattcttatctttttcaaacatttcttggcagtttctttcatcatctcctgaccagatggtcgtcataatgtcttaattgctcattctaccattggtctcacttgcttctaatccattcacaacaaagttggctgaattgttgttctaaaacacaaattggatcacgttacgccctgcttgttgtgtatacatacttccagctatttttatcaactaaaaatgagccctttgcctataacaagattttaacctgaagtccaagcaatttctgaacttcagagtgtttgtagacaccatttcggtgattttttttttttttttctgagtagaggattgatagcatcatagattttgaaagagccatgactccaaagcattaataacctctgtgccacaggaagaaagtcagaccccccagaacggcttgtcagtagcaggtcctcccctggttgacatttctttcttacctgcctgccctctccctgaccactcttccacatccccacccttcccctcctggactgcttgcaattgtctatccagtctgctgtttcacaccccagtgcctttttacatgttattccttctgccaaagtgttctcccacacatacctcgcccatctggaaaatggttccttgtccttcaaacaacaatcaaagagcctcctcctctatgaaactttgtctgatccccttaagcaatgctgatctctctcctttatttttaaccactgtacttaatctgtattttaccgtgactcttctactcttcctcctctactggtactataatatctttgggaataaggactgtgtttttgtaaccacagagcccactgcctggcatagcataggcactcagtgaatgcttgatgaacagaagaatggatgcaaacaatgaatgtatggcaggacatagccctggtgaaatcactggcaggggcttgtgtgaagtaactgcataagaaaaaaacagcatgctgttagaggtgaagggaccagctttgagtttaacagaagtaaggacagaatgggtgaagccataatgtcaactttgaaatatcaccatttattaagaaaccacatttgaagttctaggatccttaaatgaaggcgcttttcaccaaatacttttctaaatttcctggggtgtttataacatggaggacctatttcctgagctaccagagtcctaacacatacctaattatgagttggtcaccaagagttatcagtaatcacaagtaatgaaagcatggctttgggtgagtgggtgggtagggtgggtgaggtgggatatgccatgttttggaccaaagctgtccacattgatgtgtagccattgttttcatgattctagcacccagtggatgttgagtaaatattttgtgagtaattgaatgctgagtgtgtagctgggggtatgacagccagctaactgtcatgtctactttctcagctctctgagatggcaatgctaattttgctggagaaagtagcatcactgttttacttggttccctctcttcatactgcctaattttagctagttcttattattacttgctttgtttacttcttggattctttatcgcattacctgtggtgtcacccactgtcttactctgggcaaatgaaccttgtttttttgagaatgttaagttcatctgacataagccgctcaatttcactcctcaaattcttctacatcagcattcttttctctaccctggggaaaaagaacctcctcatttaagtgtgctttctcttcttcttaaatattgcctaagcaactttttaacttttaatctctcattgtccatttacctctttctttgtttgcagacatcattagaatctccatccttgaaacaactcaataaacaaaaattttgcttgactttactagttgaataccttaacgttcacttttctttttacctccaaacttcttgaatgacctatgaccactatctacaccttttcttcatacactgaggtctggaaatctttattacctggtttcttctctcagtctccaaattattaaaaagtcaatttctcagttttcatttttcttcacctcttgataacacttgaaaccattaaaattcccctttattttgaatgggctctttcttaatgtctatcacactcaactgtctatttgctcgtatctttctgttttattttctgtttcttccgtggtcctctttctgatgtcctgagagtggatattaagttgcaccatgtctgcagggatgacaccccaaccctaaccttcaagtcaggcctctttcctatgttcagatctactgtttctggaaagctctaccatctgccccacaaaagcttcaacattaatagaaattccgtataatttaaaacaaaattccacctatattttctttcaaataaatgtttaatttgaaatatttacattaatgatgcaaccatttttctatccacccaaacttgagacctaagaatgagttgtttgctgattcttctctcatagccaaccatttcaatgttctctgatttctactgttacccaggctttgctttacattcccacttttatggtgcttatctaaacccttacttttggcctttaatattgtattggctatttatttattattttattattatactttaatttctgggatacatgtgcagaacgtgcaggtttgttacataggtatacacgtgttgtggtggtttgctgcacctatcaaccgtcatctacattaggtatttcctctatccctcccctagtccccccaccccctgacaggccctggtgtgtgatggtcccctccctgtgtccatgtgttctcatcgttcaactcccacttatgagtgagaacacgtggtgtttggttttctgttcttatgttagtttgttgagaatgatggtgtccagcttcatccgtgtccctgaaaaggacatgaactcatccttttttatgaccgcatagtattccatggtatatatgtgccacattttctttatccagtctatcattgatgggcatttgggttggttccaagtctttgctattgtgaacagtgccacaataaacatacgcgtgcatgtgtctttatagcagcatgatttatagtcctttgggtatatacccagtaataggaatgctgggtcaaatggtgtatctggttctagatccttgagggatcaccacactgtcttccacaatgattgaactaatttacactcccaccaacagtgtaaaagcattcctatttctccacatccactccagcatctgctgtttcctgactttttaatgattgctattctaattggcatgagatggtatctcattgtggttttgatttgcgtttctctaatgaccagtgatgatgagcttttttttcatacgtttgcagggggcataaatgtcttcttttgagaagtgtctgttcatattcttcaccctctttttgatggggttgtttggtttctttcttgtaaatttgtttaagttccttgtagattctgaatattagtcctttgtcagatggatagattgcaaaaattttctcccactctgtagggtgcctgttcactctgatgatagtttcttttgctgtgcagaagctctttagtttaattagatcccatttgtctattttggcttttgttgccattgcttttggtgttttagtcatgaaatctttgcccatgcctatatcctcaatggtattgcctaggttttcttctaggctttttatggttttaggtcttacgtgtaggtcttcaatccattttgaattaatttttgataaggggtaaggaaggggtccagtttcagttttctgcttatggctagccagttttcccaacaccatttattaaatagggaatcctttccccattgcttgtttttgtcaggtttgtcaaagatcagatggttgtagatgtgtggtgttatttctgagcctctgttctgttccattggtctatatatctgttttggtgccagtaccgtgctattttggttactgtagccttgtagtatagtttgaagtcaggtagcgtgatgcctccagtttgttctttttgcttaggattgtcttggctatacaggctcttttttggttccataaagatgcttttcctggctttagttgtttcttctctaggatattctttacatcgcaaccagaataagtcatcaaaggtccaattatgccacattcttgctcaaagatcttcaatgaatcttgatttctatgtgataatggttaatttcctacatgattaacatgtactctgaagctagactgcccggattttgatcctggtcccactacttcctagttttgtaaccttggaaaaattattcaactcctttgtgctttagttgcctcggtgaaaaatggggataatcatagtgctgccttatagggttgttgtaataattaaatgattatcctgcacatagtaaacagtcaatgaatttatgctattattattagtctgctatttgtgggctttcatattttgtctcaaatccaaccttctctttactcactatttctaaacacattgtgcatttttcaatatatatgcatttcaatatctatcttttgcttcctctgcctgtaatacccttttctacgccctatctctcctgtgtctttagaaattctatcagttcttcaaatgaacctcaaatagacttcctccacaatccttcacctatcataccaggattgtttatgtttctgaaatttcacagcctatcttatacttttcctgtttacttgattcatgttggcttagtttaattacacacgaagaaatcttgtgttgcctgatggactgtaaactccttgaaaacagggtttgtgttcattttttttgtattctaaagtaacaaggaaagttctccaaacataaatgtaataggtatttgttgaatgaatatagaaggaagggtgtaggttttggataagaaatcatcattatcaaactagtcaaaaatgacaagagtattgttttggatgcataagtatagaattagtacctctcactcatcccccactaagacgtttttgtcgttagcttgctgctaactgggctctggctgttacctcgcaaagactctgaagtaggaaagagcttggcacatttagaaactcacagatcatcaatgctgtagtgaggtgaaggagggagaaagtaccatgggttgaagttagagagttggagagagataggataggtcactagaactttcaggccaagttatgcagtttagggttttttttttttttgttttgtttttaaacaatggaaagcctttgaagggttttaagctggggaataaaaagataatactttacttttaaaattgcacccaggatggatggaagacagagagtgggaagatgagtgaaagcagagaaaacagttgggcactcttgtaggtgagagactgcatggccggggctcaactggcaacagtggagatggagagaggtgggtggaattgagatttattttgaaagtagaatggacaggatttgctgaagaaatgttagggaaaagaaagaaagcaatttgatatgatgtctcagtttctcactcaaacatctacgtggatgttgtggccatatttcttatttaacttatggatgaaagaaggtttcatatagcagataatttccaacaattcttaggcatcaatttacctgacaatagaaaactctgatgccatttgggatagaatgaattgttcctatatgacttccagagactgagtcattgtgggtgcttgtcatgcagtactcactgaggtgtaggaggatagcttcatggagaagatatatcttgaggtggatctagaatgaatatcaagctaaatttaaaattattaaggatggaatgaagtttatattcattatccacagtccatttgtatcaattttctgggatgtctattatcctgtaaaaaacatgtatttccgcagttataagagctttgatattggtgtgaaaacaatggtccctaattaagccataaggtattttgggaatttaaacaaatgtttggtggttatcaactgggaacttctggagaggtgaaatattgtatcggggacgcattgttctttttaaaggccacacggtgttctacttatatgtcatatcatgtacatagccagttccttcctggtggacatttaggttgtctcaaccttttcctatctccaacagtgcatgcttgtgcaagtatatccgtaggacaaaatcttaaggatagaattattagataaaagcagttaccaaatttaccaatcttcctttccagaagattgtctgggaatgactgcttttcttaccaccctaccaacacaggtgctaatctcataggaaaaaaaatgctactttgttttaattttaattcatgtttcttttgtcaggagtacaatcaagcaccttcctcctattaatatgtttatttcctcttctcacttttaaccattcttcaacctctacaattatgagaaagtaatgactgtcaaaaaaaaaattgctcattttttctgacatctttcaaggccctgaatagacgtcctaatttccaggtctgtgtagactgacttgggttactcaggtaatggcctctcttctgttgatgaacacacgtattgaagcatatatatgccaggctcagtactagacacaaggggtacagtcaatgaacaaaatacacacaatattctaccctcatagagcttacattttaaagggggaagcatacaaaaaataaattagctaaaaatataaatatcaagtggtaatagtaccacacagaagaataaagcagagtaagggtttagatggtgaagataggagagctgctcttttacatgaggttaacaggaaaggcatttccaagtacttctccctgcttctttctcatctgtgtgctctagttttactctccctcccttgtttgatccctattattacttgcaagtgtaaattccctaatgcagaacatggttagcatttggttaatggctttcccgtaataattgcattaaaatgatttctctccactatgaattatctgacatgtcagaacagacgaatgctatctaaaggctttttaaaatctgttaaatttatagggcatattccagccctcaccaagggtcacttcactccattctcagatagtgcccactgtcctgcatttgcctgctgtcaatcacaaaagagatggcttcttaatgaggctggtttatgacttttttccttaagacaaagtcagtcttcttttgcaaaagttgttctaatgaaggaaagtagaaataaaaattcatcatagcttctatggccagacataaaatgtctacagcaggattgatatggaaacataagcttttattaatttgtttatctggatgcttctgaagctagaaagaaagactttcaccatggaagcactggcaactgaatttccataatggattcaaagatctaaagaatatcctcaatttacatattctttctgaatttatgttcaaagaaagggtattaatataaacataaagtaaaataagacaaagcccaagtgtattaagactattcaaggcctgccatgcaaattgcagtggaaaagtctaccagtaggttattgggaaacagagagaaacttggagtccaaagataggagaggatacccaccactaactttcaatgaaaccacaagctggccacttagcttttcttgtgctgtagagtcaaatgtgaaacaataggctttatttatttaatactttgtataaggcactttgctcagtacattatatattgtctcatcctcatagtgagcctgaagggtagtaatttcattgtaccttacagatgaataaacttagacttagagaccggtcaaatagcctgcccaaaacaaccagttaataaatggaattgggatttaaacttagatttgtctgattccaaagcttgtgcccaaccagtgtttattgagtaccttccaaagagccaagcaacagtttgaaataggttcacatatgttcaactatcacaacaaccagatagagtagatattctgttgaagatgaggaaatgatgtgggggagaaaaagtgattgtgtgggggagaaaaagtgattgtgttgaggtcacacatctagagtggtcgagtcagaatatgtgtgaactcaagacctctagctccaaacctatgaattttgtttttaaaacatgactatagtctattctctgtacaatgttcataatattttttctgccagttgcctgctccctttaggtaaagggataattagcagagattccttgcagaaaagtgtcaaatatcagcacttaaaaacagtgctgaattttcccgttatttagcccattacttcattgagcctaatttcatgcttctaaaaacagcataagttctgtgggtagtgttcagtatgcttcagtgaaccgaatgcatcctagtggcctgagaagactcctactgcttctaaacatgtatgaataatggttgccacctgcaagtagcttaggcagtgggcaatcatacttcaattctaaagggtgtggaagggatgagtattttctgtttgaagctcaagctagattaaatgaattcttgatcttaatctactttgaactctacttggaacacatcatgagttgttttggcttactattaatttttaaatacaaatacagtgctcttgtattgaaagcataggattttgtgtaggagaaaatttgaatgtcttgaaaacattcaaaggagagctcagggaaataaatgaaagctggtggatttctaaaaatctttattgaggattaatattagaaacttgctgtacagtctaactgatttttgactttgtttctgggctattggtttcatataagacactattagtaatttcagaacaaataatatggccacatttcttgttcctaataaattggtactacttgggatcaatggatgattgttgtcattccccaaaagattttttaacagcagaaccagaaaactaattcacaaattatcaatattcagcactttgataaattcagatgaatttgcctacctaaagaaatgctacctgaaaagcttctctggcaggcttctccagagtttcattatctactctgaacttttgtttacatagcaatcatttctgctgtgttccttttccctactagccttggtaggcttcttagctgaattgtcctgaaacctataaaccagccctggaggctctgaaaaattaaagatctgtcttttttgttctgtttaataaatgttagcttaagaaagtctgcaatggaagaacactcaacttgtcctaaatgattctctcatttattcaagttgcaaatagaaagaggtatttcccaatttgcaataaaatattggactttaatttctaaaaaaaaatcttgaaagctacatactccatagacttctaagcaaagagagtcaagagacattcatcttcttgaatcttcattaatcttcacgtcctaaataattctctcatttattcaagttgcaaatagaaagaggtattccccaattagaaataaaatattgggcttcagtttcaaaaaaaaatcttgaaagctacatgctccatagacttctaagcaaagagagtcaagagacaatcatcttcataactaacaccaattgtcataaagcttccaaatgtaaacctaaactttttgttaggagtaaaaataaaaaagccaaacaaatgaaaagctgtgaactttctaaaacatcttaaagattctctggaaatttaaacatttaagttatatgttaagttgtgtctatcaagcaggtactttagaaaaagggaagatttaaacaatttaaatatatgctctagttgtttgatttaaaatgctttttgtgccaaagaaattcaggatagagatttagtaatcagagttgaaaaatgcataacacattgttctagtaattcccatcattcaaaaggaaccatctgtactgaatattcttagatagtttttcaagttcggttttacattgcagacataaaggaactacttttgtatctcttagacaacaattctgttatagaagtttacaggctaatggcaaacacatctcataattgtccttccagtttcttgacccatgtttacttccctttaatttcatgccataagtcagtgctcttgacaaagtatactctgaacatatttataaatcattattttttccaagcagttaatctctaactccctttttcatttctgtatctccatcagcattttctttgcagggttcaatactcttaatttgacatacagacccatccctgagagcaagggagagagaggaaagccctggcctttctttttgtaccttgattttttccattcaaactcatcattgttggtgcattgaaatctggaggtttgagtgagagatggaatcagagagatttaggaatggattcagattctacaactaaaaaccattaggatgcctatgagctttgttttctgcataatatctgaattacaaattgtatttaacaagtaaaactaagttgtgtccgactaattgaaaaccactttggttaatgttacctctttttgtgtccatttaaatccattaaatctttcttacttttgcctttaaaattagagtaatctatacaattcatgctactgactctgccttttaaaacacacaaatattaaaaaaaaaagagacatgttctggtgtcttcccctcagcccagtgagatgtgttacacagtagtctttgttatcagcctttggtttctgataatttagaaagctttcaatccccatcacttatgaaagtctgtgaacaataatttttatttaaagatttcttacagtgccgaatcttacaaccatttataaattcatgtcatgttttcttaaagttacagaactcttttcaatttttaagccttaacctcttgtctgcatagcaaatcctatttattttttaaaaagctgaattcaagtgtcatctcttaaatgaagattcctgatcatgtcaatcaaagagagctttctcctctgaaatcttttttttttaaatattagtttcaggggcacatgtttaagtttgctctaatagataaatggtgtgttttgggggtttggtgtacatattatttcgtcacccaggtaatgagcatagtacccaatatgtagtcttctgatcatcaccttcctcctaccctccaccctcaaataggccccgctgtctgtccttctcttcgttgtgtccatgtaactcaatgtttagctcccaattataaatgagaacatgcagtatttggttttctgttcctgtgttagttctcttaggataatggcctccagccgcatacatgttgctgcaaaggacatgatctcattcttttttatggttgcatagtattccataatgtatatgtaccacattttctttattcagtctaatgttgttgaccattttggttgataccttgtctttgttattgtgaatagagctgcaatgaacatatgcatgtgtgtatcattatggtagaatgatttatattcctttgggtacatacccaataataggactgctgggtcaaatggtggttctgttttaagttcttcgagaaattgccaaactgctttccacagtggctggactaatttacattcccactagcagtgtataaatattcccttttctttgcagtatcaccaacaactgttactttttgacttcttaataatagccattctgactggtgtgagatgatatctcattgtggttttgatttgcatttccctaatgattagtgatgatgagtattttttcatatgcttgttggccgtgtaaatgtcttattttgaaaagtgtctttgcccactttttaatgggcttgtttgtttttttgcttgtcaatttgtctaagttccttatagattctggatattaaacctttgccagatgcacaatttgtaaatattttctcccatcctgtaggttgtctatttactttgttgatagtttcctttgctgtgcagaagctctttagtttaattaggtcccacttgtcaatttttgtttttgttgcaattgcttttggcatattcatcataaaatctttgccagggcctatgtttagaatggtatttcctaggttttcttcaatggtttttataattttacattttacatttaagtgtctaatccatcttgagttgatttttgtatatgatctaaggaagctgtccagtttcagtctttggcatatgattagccagttgtcccagaaccatttatcgaatagggagtcctttccccattgtttgtttttgtcaactttgttgaagatcagatggttgtaagtgtgtgggtttatatctgggctccctattctgttccagtggtctatgtatctatttttgtacctataccatgctgtcttggttactgtagcattgaagtatagtttgaagttaagtgatgtgattcctccagctttattcttttttgcttagaattgctttggccatttgggctctttttgggttgcatatgaattttagaatagttttttctagttctgtaaagaatatcattgttcatttgacaggaatagcattgcatatgtaaattgataaattcctgaaaacattcaacctctcgagactgaaccaggaagaaatttaaaccctgatcagaccaatagcaagttccaaaattgaatcagtaataaaaaggctaccagccagaaaaagccttggaccacacagattcacagcaaaattctancagacatataaagtagagctggtaccattcctactgaaactattccaaaaaattgaggaggaggaactcttccctaactcattctatgaggccagcatcatcctggcaaagacaaagcaaagacataacaacaacgtaaaaacttcagaccaatatccttgatgaacatagatgcaaaaatccttaacaaaatactagcaaactgaatccagcagcacataaaaaaaactaatcccctctccctctccctctccctctccctctccttctccccacggtctccgtctccctctctttccacggtctccctctgatgccgagctgaagctggactgtactgctgccacctcggctcactgcaacctccctgcctgattctcctgcctcagcctgcgagtgcctgcgattgcaggcctgcgccgccacacctgacaggttttcgtatttttttggtggagacggggtttcgctgtgttggccgggctggtctccagctcctaacngcgagtgatctgcccagcctcggcctcccgaggtgctgggattgcagatggagtctggttcactcagtgctcagtggtgcccaggctggagtgcagcggtgtgatctcggctcgctacaacctccacctcccagccgcctgccttggcctcccaaagtgtcgagattgcagcctctgcccggctgccaccccgtctgggaagtgaggagcgtctctgcctggccgcccatcgtctgggacgtgaggagcccctctgcctggctgcccactctggaaagtgaggagcgtctctgcccggccnccatcccatctaggaagtgaggagcgcctcttcccgacctccatcccatctaggaagtgaggagcgtctctgcccggccgcccatcgtctgagatgtggggagagcctctgccccgccgccccgtctgggatgtgaggagcgcctctacccggccgcgaacccgtctgggaggtgaggagcgtctctgcccggccgccccatctgagaagtgaggagaccctctgcctggcaaccgccccgtctgagaagtgaggagcccctccgcccggcagctgccccgtctgagaagtgaggagcccctccgcctggcagccaccccgtctgggaagtgaggagcgtctccgcccagcagccaccctgtctgggagggaggtgggggggtcagccccccgcccggccagccaccccatccgggagggaggggcgcctctgcccggccgcccctactgggaagtgaggagcccctctgcccggccaccaccccatctgggaggtgtacccaacagctcattgagaacgggccatgatgacaatggcggttttgtggaatagaaaggggggaaaggtggggaaaagattgagaaatcggatggttgctgtgtctgtgtagaaagaggtagacatgggagacttttcattttgttctgtactaagaaaaattcttctgccttgggatcctgttgatctgtgaccttacccccaaccctgtgctctctgaaacatgtgctgtgtccactcagggttaaatggattaagggcggtgcaagatgtgctttgttaaacagatgcttgaaggcggcatgctcgttaagagtcatcaccactccctaatctcaagtacccagggacgcaaacactgtggaaggccgcagggacctctgcctaggaaaaccagagacctttgttcacttgtttatctgctgaccttccctccattattgtcctatgaccctgccaaatccccctctgcgagaaacacccaagaatgatcaataaaaaaaaaaaaacaaacaaacaaaaaacaaaacacaaacaaaaaagaaaggtttgagctaagaacttgcaggagacaaggaaattagtcaagcagaaggatatctgggggaatggcatgcgaggcagaagggaaagctagggtcgaggccctcagggaaagaagcaaggccaaggggctggagtagagggaggaagaggggaagtagtggaagatgagactagctttactactgattatgatgtaagaatagtggccagtttcctttccaacttgggcccggcagaatggctcctgcaaagaagggtgatgagaagaagaagggtcattcgccatcaacgagatggtgacccgagaatatcccatcaacattcataagtgcattcatggagtgggcttcaagaagcgtgcccctcaggcactcaaagagctccggaaacttgccctgaaggagatgggaactccagatgcacactttgataccaggctcaacaaagctgtctgggccaaaggaataagcaacgtctcatactgtatccatgttcggttgtccagaaaatgtaatgaagataaagatttaccaaacaagctctatactttggttgcctacgtacctgttaccactttaaaaaaatctacagtcggtgtgaatgtgaactaactgctaatcatcaaatataccaaataaagttataaaattgtttaaaaaaaaaaacaaaaaaaaaaaaactaatccaccaccattgagcaggctttatccctaggatgcaagactgatttcaacatatgcaaatcaataaatgtgattcaccacatgaacggaataaaaacaaaaaacacatgatcatctcaatagatgcagaaaaggcttttgataaaattcagcaaccttcatgttaaaaaccttcaaaaaactaggcattgaaggacatacctcaaaatagtaagccatccacaacaaaacccacagccaacatcacactgaatgggcaaaagctgggagtattcctcttgagaactggaacaagacaaggatgcccactctcactgctcctatttaacatagtattggaagtcctagccagagcaataagggaagagaaagaaataagaggcatccaaataggaagagagaaaatcaaactacctctgtcaaactacctagaaaaccccatagttttgcccaaaagctcctagataacttcagcaaagtttctggatacaaaaatcagtagcatttctctacaccgataatgtccaagctgagtgccaaatcaagagcataatcctattcacaatagccacaaaaaataacatatctagaaatatagctaaccagtgaagtgaaagagctctccaatgagaattacaaaacactgctgaaagaaatcagagatgacataaacaaatggaaaaacattccatgctcatggataggaagaatctcctctgaaatcttatagctagagaaaccataacatttatcatacaaatttggcattttttgagggtgaatgaatgggagaactattagtagtcacattgggacaataatcataaactggaactatcctgtgtaaactggatgtattgtcacccaagttattgccttttgggatcctaactgttagtatcaaggactttggaccgaagtctgtctggttccaaattctggttctcagcatgactttgagtagattattatatcctttgccattcacttattctttttatagcttcttactaagcttgtattagatgtgtgcaaattgtaaggcattggtaacacaatggtaaataatatttatggtttgtgctgtcatgaagcttacatccaactttatctacaaagtggggccaaggatacctacattatgaaaattctttatatcatcgtgagaagtaaatactatttgtgaagcatttagtaggattttcagtatataggaagtcctcagtgataactataattttatttgtatttttcatatgccattttgttgcatagtcgcatgtataattgtaaggtttttgagagtaggaggcaaggcttatgaacatttacataccttcaggcatcagtatagtagcctctcattgcatgaatgaatttattgagtgaattccactaaacaccaggtatcaaactttttttttttctcattatctcttctgttttttgttcctctgttgtttctttcctgctcttttcagagcatttgaatattttttagtgtgccattttattttttctattggcttttagttatacccccttatctctctgtttatcatttatcttcctttttaatttaattttcttgattgctcaagggctaaaaatatgcagcccctatgcattagaatctattcatactcagtattgtacctctccacatttcacacttaacatttgacaaatgtagtaaacttacaacattttatttcaatttagtcatcctctttcttttattttctttttatttttttgagacagggtcttgctctcacccaggctggagtgcaatggcacaatcatggcttactgtagcctcaaactctggggctcaagcagtcctcctgcctcggcctcctgagtagctgggactcagtcatgtgccaccacacctagttaattttttatttttatttttagtagacatgaagtctcactatattgcccaggctggtctcaaactcctgggctcaaatgatcctccctgctctgcctcccaaagtgctgggatcacaggcatgagccacaacacctggcctcatctccctttctttgtatggttattgtcatattcattattttaacatgtcataaccccaaccttagagtgttttcacttttgccttaaatagtagtctttaaggaaattctaagaaagaaaacatactactttatatttagtaatttacttaacatttccagtgctctttttctttcttactgtagatctgaatttccatctggtatcagttatcttcaactttttgtatttcttatagtgtaggtctgctggtgattaattttctcagcttttatttatctgaaagtgcctttattttcttcccatttttgaagaatatttttgttggttgtagagttctgagttaacagctttgttttcgtttttcctttcagcgatttaaaaattccatgccattggggttttcagtccccactgtttctcataagcccatgatcattcttatccttgttcaactgtacgtaatgtgtgtctttcctctggatgcccttaatatttcctctttatcttggatgtgctgcagttttattacaatgtgcctgggtgtggttttctttatatttattcttcttggggtttgctaaacttcttggatctgtttgatcgttttgaaaagttttcagctgttattccttcaaatatttttttctggcccattctcactcgcttttctttctaggattccaattacatttacgttaagactatttggtattgtcctacctattcctgaatcttagttcatcttcctgattattttccccactcttcctttctaagattaaataatttctactgatctgttttaggttctcttttcttctgccatctctaatcagctattcagacctgtccactaaattgttcatttttatttttttttagttctagaattttcatttggttattttctctgcctagactcctctattcactccttgagatcatatttcctgtcattctttggacatatatatttaaaattctttaacatatttacaaaagctgctttagattctttgtttggacatatctgggtaattttgagatttgtttgtatttactgcttttttgcttgcctatgtatcatattttcatttttttaaattatgctttaagttctagggtacatgcgcacagcgtgcaggtttgttacatatgtatacatgtgccatgttggtttgcttcacccatcaactcatcatttacattaggtatctctcctaatgctatccatcccccaccccccacacccccccaacaggccctggtgtgtgatgttcgccaccctgtgtccaagtgttctcattgttcaattcccacctatgagtgagaacatgtggtatttggttttctgtcattgtgatagtttgctgagaatgatggtttccagcttcatccatgtccctgaaaaggacatgaactcatcctttttcatggctacatagtattccatggtatatatgtgccacattttcttaatccagcctatcaatgatggacatttgggttggttccaagtctttgctattgtgaatagtgccgcaatagacatacgtgtgcatgtctttatagtagaatgatttataatcctttgggtatatacccagtaatgggatggctgggtcaaatggtatttctagttccagatccttgaggaaacgccacactgtcttccacaatggttgaactaatttacactcccaccaagtgtaaaggcattcctatttctccacatcctctccagcatctgttgtttcctgactttttaataattgccattctaactggtgtgagatgatatctcattgtggttttgatttgcatttctctgatgaccagtgatgatgagcattttttcatgtgtctgttggctgcataaatgtcttcttttgagaagtgtctgttcatatccttcgcccactttttgatggggttgtttgtttttttcttgtaaacttgtttaagttctttgtagattctggatactagcactttatcagatgggtagattgcaaaaattttctcccattctgtaggttgcctgttcactctgatggtagtttcttttgccatgccgaagctctttagtttgattagatactatttgtctatgttggcttttgttgccattgctttttggtgttttagtcatgaagtccttgcccatgcctgtgtcctgaatggtattgcctaggttttcttctagggtttttatggttttatgtctaacatttaagtctttaatccatcttgaattaatttttgtataaggtgtaaggaagggatccagtttcagctttctacatatggctagccagttttcccagcaccatttattaaatagggaatcctttccccatttcttgtttttgtcaggtttgtcaaagaccagatggttgtagatgtgtggtgttatttctgaggcctctgttctatttcttggtctatatctctgttttggtaccagtaccatgctgttttggttactgtagccttgtagtatagtttgaagtcaggtagcgtgatgcttccagctttcttctgttggcttaggattgtcttggcaacgtgggctcttttttggttccatatgaactttaaagtagttttttccatttctgtgaagaaagtcatcggtggcttgatggggatggcattgaatctataaattaccttgggcagtgtggccgttttcacaatattgattcttcccatccataagcatggaacgttcttccatttgtttgtgtcctcttttatttcgttgagcaatggtttgtagttcttcttgaagaggtccttcacatcccttgtaagttggattcctaggtattttattctctttgtagcaattgtgaatgagagttcactcatgatttggctctctatttgtctgttatttgtatatcagaatgcttgtgatttttgcacattgattttgtatcctgagacttcgctgaagttgcttatcagcttaaggagattttgggctgagatgatggggttttctaaatatacaatcatgtcatctgcaaacagggacagtttgacttcctcttttgctaattgaattccctttatttctttctcttgcctgattgccccagccagaacttccaacactaagttgcataggagtggtgagagagggcatccttgtcttgtgctggttttcaaagggaatgcttctagtttttgcccattcagtatgatattggctgtgggtttgtcaaaaattgctcttactatttggagatacattccatcattatgtagtttattgagagtttttagcatgaagggctatcgaattttgttgaaggccttttctgcatctattgagataatcatgtggtttttgtcattggttctgttgacgtgatggattatgtttattgatttgagcatgttgaaccagccttgcatccctgggatgaagctgacttgattgtggcagataaactttttgatgtgctgctggtttcagtttgccagtattttattgaggattttctcatcgatgttcatcagggataatggtctaaaattctctttttttgttgtgtctctgccaggctttggtatcagaatgatgctcataaaatgagttagggaggattccctctttttcttttgattggaatagtttcagaaggaatgttaccagctcctctttgtacctctggtagaattcagctgtgaatccatcgggtcctggactttttttggttgataggctattaattattgcctcaatttcagagcctgttattgatctattcaggaattcaacttcttcctggtttattcttgggagggtgtatgtgtccaggaatttatccatttcttctagattttctagtttatttgtgtagaggtgtttatagtattctctgatggtagtttgtatttctgtggatcagtggtgatatcacctttatcattttttattgcatctatttgattcttctctcttttttattagtcttgctagcagtctatttttttgatcttttcaaaaaaccaacttctggattcattgattttttgaagggttttttgtgtgtctctatctccttcagttctcctctgatcttagttatttcttgtcttctgctagcttttgaatttgtttgctcttgcttctctagttcttttaattgtgatgttagggtgtcgattttagatctttcctgctttctcttgtgtgcatttagtgctataaatttccctctacacagtgctttaaatgtgtcccagagattctggtatgttgtgtctttgttctcgttggtttcaaagaacatctttatttctgccttcatttcattatgtacccagtagtcattcaggagtaggttgttcagtttccatttagttgagcagttttgagtgagtttcttaatcctgagttctaatttgattgcattgtggtctgagagacagttttttgtaatttctgttcttttacatttgctgagtagtgctttacttccaattatgtggtcaattttagaataagtgtgatgtggtgctgagaagaatgtatattctgtagatttggggtggagagttctgtagatgtctattaggcccgcttgttgcggagctgagttcaagtcctggatttccttgttaaccttctctctggttgatcggtctaatattgacaatggggtgttaaagtgtcccattattattatgtgggaatctaagtctctttttaggtctctaaggacttgctttatgaatctggatgctcctgtattgggtacatatatatttaggttagttagatcttcttgttgaattatctctttaccattatgtaatgcctttctttgtctcttctgatctttgttggcttaaagtctgttttgtcagagaccaggattgcaacccctgcttctttttgctttccatttgcttggtagatcttcttacatccctttattttgaacctatatgtttctctgcatgtgagatgggtctcctgaatacagcacactgatgagtcttgactctttatccaatttgccagtctgtgtcttttaattggagcatttagcccatttacatttaaggttaatattgttatgtgtgaatttgatcctgtcattatgatgttagctggttattttgcccattagttgatgcagtttcttcatggtgtcgatggtctttacaatttggcatgtttttgcagtggctggtaccagttgttcctttccatgtttagtgcttccctcaggagctcttttagggcaggccttgtggtgacaaaatctctcagcatttgcttgtctgtaaaggattttatttctccttcacttacaaagcttagtttggctggatatgaaattctgggttgaaaatttttttctttaagaatgtcgaatattggcccccactcttttctgtcttataaggtttctgccgagagagctgctgtttgtctgatgggcttccctttgtggacaacccgacctttctctctggctgcccttaacattttttccttcatttcaaccttggtgaatctgaaaattatgtgtcttggggttgctcttcttgaggagtatctttgtgatgttctctgtatttcctgaatttgaatgttggtctgccttgctagtttggggaagttcttgtggataatatcctccagagtgttttccaacttggttccattctccccgtcactttcaggtacatcaatcagacgtagatttggtcttttcacatagtcccatatttcttggaggctttgtttgtttctttttactcttttttctctaaacttgtcttcttgctttatttcattcatttgatcttcagtcagtgatatcctttcttcgacttgatctaacaggctattgaagcttgtgcatgcatcacgaagttctcgtgccatggttttcagctccatcaggtcatttaaagtcttctctacactgtttattctaatttgccattcgtccaacattttttaaagattttcagcttccttcaatgggttagaacatgcccctttagcttggagaagtttgttattaccatccttctgaagcctacttctgtcaacttgtcaaagtcattctccgtccagctttgttccatagctcgtgaggagctgtgatcctttggaagagaagaggcactctggtttttagaatttttaaattttctgcactggtttctctccatctttttggttttatcaacctttggtctttcatgttggtgacctacagatggggttttggtgtggatgtcctttttgttgatgttgatgctattcctttctgtttgttagttttcctcctaacagtcaggtccctcagctgcaggtctgttggattttgctggaggtccactccagatcctatttgcctgggtatcaccagtggaggctacagaacagcaaatattgctgcctgatccttcctccataagcttcgtgctagaggggcacctgcctgtgtgagatgtctgtcagcccctactgggaggtgtctcccagttaagctatgtgggggtcagggacccacttgaggaggcagtctgtccgttctcaaagctcaaacgccatgctgggagaaccactgctctcttcagagctgtcagacagggatgtttaagtctgcagaagcttctgctgcctttttttcagctatgccctgcccacagaggtggagtctatagaggcagtaggctttgctgagctgtggtgggctctgcccagttccagcttcctggccactttgtttacctacttaagcctcagcaatggtgaacacccctccccccaccaggctgctgcctcgcaggtcaatctcagattgctctgctagcaatgagcaagtctccatgggtgtgggacctgctaagccaggcacaggagagaatctcctggtctgctggttgctaagacagtgggaaaagcgcagtatttgggcgggagtgtcctgtttgtcatggcttccctttgctagaaaagggaaatcccccaaccccttgtacttcccaggtgaggcgatgccccaccctgcgctggctcccgctccatgggctgcacccactgtccaatcagtcccaatgagatgaaccaagtacctcagttggaaatgcagaaatcacccatcttctgcatcgatgacgctgggaggtgcagactggagttgttcctatttggccatcttggaatggagatcttatttctttatctggtgattttttattgcatactggacattttggacaatgtgttatcatgcctctggattgtgttattttcttctgaagaattttgcttgttatcttagcatgctgttcaattggctgatcacgttgaacatgtttaagcatggttttaggctttgttagtccaaatctttgagaaatcccaggtgctttcccaacctattcaacctggcagtattcagtgttgatagaggatgtttttcttgatgataggctttgttttagactttactggagtcataggacttactttaggacatagtctttacttgtagagaggtaccaactttctgtttctcaggtagatcccaggggtgtcaaagtagtatttatttatgagctctctcaaacccataggacctgaactgcaatgatgtctagtactattcttcttccagcattacttgacctccactatttctgttctctcaacctgataacattttctctctgttaagcctccagtattctcactctgcaaatgtatggtggtgatctcagtcacagatttgtcccatgtctgggacaaatctctgcaaaacttctgagacttctctgtgttaaagtctttactctctaagactctgctttatagatgccagccatgccagctgcctcagactccagctctttttgtcatgtttaggaaaatatccttattcacagaggtggacattcgtgggcagagggatttcagttctggattggcttgttagccactgtttgaaaacggtttcctcatatattttacttagttttgtaagtattttctgtgagacagataatctgttactagttactctatcatagctggaagcagaaatatataggtatcaatttgatttgcaattgtttctagtttacaatgcattctgcctatcttaaaaaatttgtaattctaatcattttatttttgatcagggaatgtatttattgattcacatgaataaaattcaaaggctatagaagaatatgtagcaaaaaatctctcttctaatctagtagcctaattcttctcctcagaggtgatagatattaccagttctttttgttccctttcagacatattttagatatatatgaaatcctctccctcttcttattttcctcacataaatgatagcatgatgtgcatactttatatttttttgtgttttgtcttttttctacttaatgacatatcttggaggctatacatattaatatataaagaatttctacattcttttttgggctacatgatactcagttttatgaaataccatgaattatctcaccagattcctatttttactcatactttttggttattataaacaatgcttcatgaactactttgggtaaaccatttggtatatgccagtatatctgtaggatacattcataaaagtgcaattgctacctgaaaatgtatgcacatttgttacttagttaaatgttgccaaatttccctccagcagctgtgttagtggctgtagcctcgttaaaaatgtatgggaggaatgctgacatttttgttttacctgcagtatccattttctccatggtacatctacaaaattggcttctattttttattcttatgtttatcttaatcttttaataatctttccctgattaacttacaagtttcttgttataacaaataagggggctaagggggagggggatggttaatgaggaaaaaatagaaagaatgaataagacctactatttgatagcacaacagggtgactagagttagtaacttatttctacaattaaaaataaccgagagtgtaactggattgtttgtaacacaagtgataaatgcttgagggaatggatactccattctctatgatgtgattatttcacattgcatgtctctgtgtaaacatctcatgtaccccataaatatattatacctactatgtacccagaacaattaaaaataaaaaaatttaaagtacaaaaaaagacaaaaagagtcacacagaaaataaaggaaaatagtctatagaaggataaaaaacaaaacaaaaaaacaaataagataagcagcagcgatttatataaattagagttattattattactgtggttgctgtggttgattttcctaatattccagggcacgaatcagctgataatatccattttaaaagtgcaattttatttccattttagtcagtctgattttcaaattattctcccctttttgtgctttaaaaataggggtataacatatgctagcctgttcccaatttgaactcgtgtctttcaaatgcacagtctaactttattaattctgtatggaatcatgtcctgtgagctttctagcttttctttctttcttgttttttttcctttacctcacttgctcttctgaatttgaggagctaaagatatttgtgacaagacttagctactcaatgaacattccgaatcaatgttttcctgtggaaacagtgactctgatggaatcttctccacttcctggaacattaaattgtcactaggtaattcaggagtctctttttcaggttcttgtctgcagtatactgaaaagtgaattgtgacctcattgttatgaaatttggaagtgtttatctttaatgttagcttagagtgtttttttttccctctctcttgcattccctttaaaccctgaccatttaaacattatagacaaggacatttctcatgtgtttgtctttctctaaatctgttagtactttaaactgtgtggtcccaacacgatgttgtactatacttgtggaatcaacactcaaaagagcccattcagaagagttttttttcttcttcttggtaactgctttctaaaaaaaattcttctttatattctaaagctctaagcccccaagccccatcctcccatgttgagattcctgttgccacctgcctttgactcttctatgtcctcctgtcaaatacccttcctggcctattgttccaacttattataaaacactgtaactgaatggcttgaaaagatgttgcgaatgtagttgatttttcctctgagaaacaagtgtgttagcttctttggagaatgtattaactggtactactggcactactaagctctaggcttagaactgtgtgagggaaacaaaaaacagaacaaagatatgcagaagtctggtttttgccctccaggagtgcaatggttgtgagtgtaggatctgaactcaagcagacagatgtaggctggatgatcttgggtgaggtacactaaatctcagttctctcatccgtgatacaattgtactcatctcacagattaaacaagataaatctgtggggagaatccgccccagaattgagagaggctgttctctgggcacacttgctttatgtggtcttttcaattgctgtcaatcagtttttaaaatctggttgcccaaacaccattgtggctattaccatgactacttcatgttctggctgttctggcagtacaaatgagtctggacatctacttcaggtaaattggatgtttgattaattaataaccatgtaggccatttgtagatggaatcgcacagtgtgattagtcatggtagcatgaagactttaacaggccaatccctacatctcaatggctttatatattacatatttatttcttgttcgtatcacattacaatgtggattgggggtaaagtgggacacagcatgttccacaaagttattcagattcccaagctgtttttacctagttcattatcctctaaagccccagagtcttggatattaatttctctgaaggaagagtgtatgatagtgtgtccagaattggtgggctcttggtctcactgacttcaagaatgaagccgcggacgctcatggtgagtgttacagttcttaaaggcagtgtgtccagagtttgttccttctgatgttcggatgtgttcggagtttcctccttctggtgggttcgtggtcttgctggctcaggagtgaagctgcagaccttcgcggtgagtgttacagctcttaagtcagggtgtctggagttgttcgttcctcccagtgggtttgtggtctcgctggcttccggagtgaagctgcagacctttgcagtgagtgttacagctcataaagacagtgtggacccaaagagtgagcagcagcaagatttattgcaaagagtgaaaaaacaaagcttctacagtgtggaaggggaccccagcaggttgccactggtggctcaggcagcctgcttttattctcttatctggccccacccacatcctgctgattggtccattttacagagagctgattggtctgttttacagagagctgattggtctgttttgacagtgtgctgattggtgcatttacaatccttgagctagacacaaaagttctccatgtccacactagattagctagatacagagtgtcgattggtgtatttacaaaccctgagctagacacagagtgctgattggtgcatttacaaaccttgggctagatacagagtgctgattggtgcattcacaaaccctgagatagacacagggtgctgattggtgtgtttacaaaccttgagctacatacagagtgctgattggtgcatttacaatcccttagctagacataaagattctccaagtccccaccagactcaggagcccagatggcttcacccagtgggtcccgcaccgggcggcaggtggagattcctgccagtcccgcgccctacgcctgcactcctcagccctttggcagtggatgggactgggcgccctggagcagggggcagcgcttgtcagggaggctcgggctgcacaggagcccatggtgggggtgtggggagactcaggcgtggccgcactgcaggtcccgagccctgccccgtggggaggcaactaaggcctggtgagaaattgagtgcagcagctgctggcccaggtgctaagcccctcactgcccggggtggcggggccggcctgccgctcccagtgcgggcccaccaagcccacgcccaccggaactcgcactggccttcaagtgcctgccgcgcagccccggttcccgcctgcacctctccctccacacctccccgcaagctgagggcgccggctccggccttggccagccgagaaaggggctcccacagtgcaggggagggctgaagggctcctcaagcacggccagagtgggcgccaaggccaaggaggcgctgagagccagcaagggctgtgagggctgtcagcatgctgtcacctcttaataggtggtttggaggttttaggaaccaggtctggatggggtacatatgacttacattcacattctattggctagaacttgtctcatagcctgatcagatgcagagggtctaggaaataggtgctgaaagaagggaacccatgcacattaatgagtaccattgattgctccctttcagtggcactttaaaggtttggacttccagttgtctcacccaggttgagtgcaaccacttaggcattcctaccatgtgacaaggtactggcatctagcttgatgtgggtctgcccaatggcaaatgattaccctaagactcaaatttcatttcccttcttcctgtgtcttaaccaaggagagattttaaaacgtataccagagacgaagaggcactttgaatttgtccgggtaggtgcttcttggtttggggatgttatgaccttagataggtaagtgaaggctgtcatgtggaatgactcccagatttaatgtaattccattacaagtaggtttacataagaggcacaactttgtttcttggttattccttattaccatatttataacacttaaaagaaagagttcagaaaatagctaggattggtttactccagatacctggagtgttaaccagcaaactgctttgtagccttgtgtgtaccaacagaagtaggttgcatattctgtcttttctttctccttgaaagcaatactttgctgatctttaacttatatatgtcccttggaatgatgccagggagaatttttataataggtccaaattatagttgcctgtctttgtgtgtgtatgtatatttaactttttaatttgattttatttttaagtagctttatctctggatgggcaatgcatatcttaatagtgtgatcaaaaacagttaagataaaaaatcttaatagagttttatgacccataaaaatactcaataatatcaatttttgtttttatgactattatttgcattctctagggaggcagattaacacataaaaactacctaaagaatataaaaacaatgtatggataatatggcagaaatggtatataattggtataaagtacaaaaccaaggactgctagtgcacagaagctttggtttgtttatttgaggagattcgtcttagcatcggccctactgtgtatgacagacaaggactgttatcacagcatgtactaaggaatacatgaccccttctgcttaccttcgaaaggggagaaattgtatctgtcgagaaacttggtggaacaaacagaagtgcatgcaattaattgtaagacatagggcatcggttctgttttctattttagaactgtaaaaagtttgacaaagtgaacctgaactctgataaagcagcaagaaaaatctggaagtgttctttgggttaggagatgcttataactggttggatggaaatagtagttacattaagattatttgttactttgggatctgatgcagggctgaaacaacccaatgtaagtcaatgatactttcaccagattgaagtttctaagctgtttttccaaaaaaaaaaaaaaataaacgaaaaaagaaattcaaaattaaaacaaaccactcccaaattctcttacatccatggcattctgaatttataaggataggctttggcccttttagaatctggttttatgaaggtggaaggaatgacaaggcttagtgcaaaatattaaaagtaccttatgcccttttaccaagtgtgcaccactgcgttcctgagtctgtgtagtcttcccatctatttctcctttcgtttcttcctccttctccttcctccttcctcctctcatcttcagaaaatgaaaggctctggaagtctattgtgtgtgagtacctttgggaccaatgtaaaacatagagcaatatgcatgcaagggatgcttctccttcagattggaaaaaaagtggatttaaatgaaaacagacctgacaatatacctttttctgcctataggtttgatgaggtaatgttataaagtatattgctctctaaaaatcctgagggtttttgagtgaatgatgtaatgaaagtaagctacagtagtcagtaggaatataatctaggaagtatgtcctgggataaataaaactgttgatagcatgaacgttatgtgcttgtgagctcagctagtgaggggatgaaggagcttgcatttattaaatagcttagttaaatgaattatacatatattccatgacttcaactatataatgttgtagttaaagtcatcattttagaatcagactgaagtggatctaaatcctggtattatgacttaatattcacctagtcattagcaaatgactccacctctagcctagccttagtttccttatctataaaaagtatttgattaaaacctaccttaaggatttgttgtaagggttataggaaataatgctataggctttggcaaataaaaaacaatcagctggctgttattaccttacagtggttacatatttttaaataaccaaaataattgacataaaattaacagaaaaacttaacaaaatgatttagtaaataacttaagatcttggagtgcctcatagtcatcattggaaacataaggagtattgtacttttctagaaccaataacataattctgggtgatggaatccttttgctataagtatctatgtgaatacacaaaacatgcagggtttgaactaagcatcgaagaacgaggatgatttgagaaaaagttctgtctccttgggaataatacaaatcagtgatccagacatgcagaaaaaagacaaaaacaaggtggaatgtggtagaatactacactaaattatttgagactgcccaaatacctccagatggagtaaggctctctaaaaagatattgactggtttttctatctcttctggattgctctttcaagtgaatgtgtaaatatgtctataaaaacgatgcagtgttgggtaacggcaacaaaattattggtctcagtctcccttggctgttttttcccctaatttctttgtgttttagttgatctacttgcaagatggaatagtggagataacattttcctagtgttcttttgaagacacgtataattgtagtcctattgtcctgagactgaatgtacagatgaacccagccatgaatggagaaaacctcaagaaaagtgaaagaaacaaaaacaagccaacagctccttcactgggataaaaaccctcagctaaaaagagatagttactctaagaattgtactgttttattaagttagtgacttaaaatattaatctttttgaatataatttggcatggggaatctttgggaagataaagattgtggtcaatataacacctatctagccaccttttttgcgggtggttgggtcagtagcagtggaacaaactagtatgtaaattgagatttctaggaaaggtggaaaatatctggggaacaccattggatcatagcttagttattgcagcaataagaaaaatatatttctaactttagggttaatttcactcacgttttccttcatttagatctggtttttaatccctgatttagagccgatcttttaaattgtcattttacttttttagagctaaatggtttgaattggacttaaatattcggaaataatgttaaaatgtgaaattcgttgcttttagtataaaataaatgtatgcattgaaaaattctttttacatggtgattactttcatatattgtgatgccttggttttatataataattgcaatgatgatgatgatgataatgagattagctaacacttatgtgatacttccctttgtgacatgtctgaatttcttctggttatgtcatacagtggtggtaataatacacgtgaaaggccaggatagttctagcccttacataagtttgctttatacttaagctagtcttttagtccgtttttcctttaaacatcataacctattttggttatagctaccagttgtaactattttcacatagatttttacagttaatggaaaatgaacccttctggaagttatcctttttatcagcaatgaagattataccagtgcatgctttattacaacctagaatgagtgtgacttgaaaaaattagaacttaccaagttgcttgactccctctttgtccagtgcagcagttaatatctcatctcccattctctagggccagtcagcctatgttcaaatgtcagttcttccatgtattagctgcaaaactgacctggggaaaagtatgcagcttttttagttcactattctcatacgtaaaatggggtaatggtacctacttcatatgattattgagaagtttaaatgaattcctgttagaagcagtaagaacagtgtctctcccatggcaagtgccttatgtttttaaaataaatataaatgtctgaggctcattgccatcatattatcacagagcctgtatcaaggacatggaggcaatacctgcagtggccaagcatgaaaatctttgacagttctgttacttgacagctgtaagagctttggaaagttgcttaaccttagactagctctcctcattgtaaaatggaagtcagtcatagtgtctgctttgtgtggttgctgaggattaaatgagatgatatttgtcaagacttgtggtgagtcacaaagttcactgacatctcatccagatgggcggagaagaggtagcttcttagttttgattttaactaatgtgatcttcctcctgagcaaaccactgctgattagaaggaaaaataaattaaatgtctaagctgtcttagtctgatgtattgattttagataatgctctgtctctaggaaaaggtgctcagactttcagatctctgtgttccaggattttccaggtttctctccaagatgatgtctggtatgtaggggaggggaggggcttaggcagcctcttggtgggagagaaaagtctggacccataggcatagtcatggtgtccactgatcgcacttcaggaacagagaccaatgcctctggatggactctccacacccagcctttgctagggtgccatcacattatttgccaggcttgtgttctagctctcagctagtcactttctaatttcccccttaaacacctggactcccagccctacctcaaaggttgccatagggaacaaagagctgctcagaaaagctaaacatcgaggcctccctctgcctaactccctccaaatgtccttggtatggggcagcctgagagggcatatctttctagagccctgaacaggaatggggcagaaatccttcatccctcgggctctcctctatccacacaagagtctttaaggcacacacatctgactgctttgttccttccctgcttttccttctcacactcctgggatgagaaagagagatgacagtttcctctacactcttctaggccaaatcttcatttcaccatggaagaactctttgagccaaatcatttggatatgtgaaaagcaatacagacatttaaacattcttcctcaagacaatatgtcagtaagacttggcaaatggcctgttttgaatgccagatgctgaatattaactccttcttcctttatctgtcttaagaatgttttataaatttgaaaagcaaggaagagcacagtgatgttttccaaaatattaatccaaagtaagcgcataatcaatacaagctttataatgatgatgatgatgatgatgataaagtaaccattagcacaggataattgctatatagattgtttttacccttggatagcttctggttttagggaagagaccataacttcagagcacttgtgcacttggcatcatgacacgtaattgctccgcctctcacaattctcaccccctctgccccctccccatctctctggccacacaagactttctgctcctggaacatgaaatgatttttcctgctttggggtatgtaataattactactctgtcacctgaagccctgtttcccatatcttttcttaactgacttctcattttcagtccctgccttaaaagctgccacctcgattttcctggatcttttctggccaccctaaccnaagtagccatccccacttccagttactctccataccacatcctcctttttcttttcttttctgcataagtcactattttatgtttacacatttttttgtctttctactccactagaatgtaagcctcaagaggacaggggctgtgtccgctttattccccactgggctggcagaggacctggcacaaaaaagagctcaatacatagttattgaatacatgataagtgactgaatgctatcttatttcagataaaaagaatcattatgattattaacattggtgacatggatgtgcatggagcaaaagtaccttgcataagcacagaaataaggattttctatattatatttattatgaaccatagtaatggcgagaatatctctctccctttattattttgttctatagtgatggtggtggtagagtgggctagcactgcctcttaaaaatgataagaagtcctttgaaggaagacatcatgctcgtatttctttcacactttttttgatatttagctgctcaatacaaacatgttggtgatcattggtggagggagtggggagtgggtgagggaaaattacaggccctccatttgcatatgattaaactggcaagactttccaggcaaagcagtgcttcagaaattatgtgattgacagaaggaaggtcacatatgtactttctagaagaagagtaattgtcaagttgtgtgctgaggagcctcagagcctcagttggcaatggcttatgtggaaattttcatttgaacagagagttttagggccacacccaagtggaaactacttatttcaggattggagcctccacagagaaagatcagaggtgggaatgaaacaagaaatagttccagagactgctgctgtgtaacaaattatcttagaacttagcagctgagaacaaccattttttttatgctcacgcaggaagctacaggtcaagaagtcagtgaaggcacagcgggaataggttgtctctgctccagctgtgcagacttgaagggcaggggagaccggatgccaggatggggtcacataaagacaccttccctcacatgtctggtgatcaggatggctccgtgtggcttagtgtccttacagcctggtggttgcatgttgtcagacactgggtgtggagctcaggactccaagcatacgagttccagtaaagaagacggaagctacactgcttttcatgtccaaccttggaaatcacacggcctcacttccactgtcttctcttggttgcaatagtcacaaaacccaccgagttcaagggagatgacatagaccgcccttctaaatgggaggagggtctaagaattttgcagccatgttttaaactaatattaggttggtgcaaaagtaattgcggttttngccattaaaagtaatataaggggccaagcgtggtggctcacgcctgtaatctcagcactttgggaggctgaggtggatggatcacctgaggtcaggagtttatgaccagcctggccaatgtggtgaaaccccatctctactaaaaatacaaaaattagctgggtgtggtgccgtgcgcctgcagtcccagctactcagaggccgaggcaggagaatcgcttgaacctgggaggcgaaggttgcagtgagccgagatcgtgccactgcactccagcctgggtgacagagtgagactccgtctcaaaaaaaaaaaaaaaaaaaaaaaaaaaggaaaaagaaaaaatgtaatacaaatgtaaggatgaaagaagcaagcagaggggaagagaggggtcttgtattctggaaagggagataggcttgtgactgcgcggatccaggttacatttactgcacatgtgccctgctttttttgcagctagagtgttttgatgatcttctgagagaaacgtctccttcctcagctccagtgtgctcgggagctaagagctgcagaaaatcatttgaaatctttggtggtcataataaaataggtaaaggtactctcaggtactcaacgaccctcttgtcaccaagcagctcctcatcagaacttctccaaacatacactctctcctttccacctccagctcatcttgcttggcctccgctttttccgtcacatctcatctcctggcctttttcattcctcatccctaccttatttccaatttcagtcacatttcggtgaacacactgctcttggtgcttacagcaaggaaggctagttgtgttgaatttatagtactttttcaaccagccattgggaagcacatggaactccccacactcatttttactgccatttttttttcaacataatttacaagaaatagaaggaatgtgtattagctaattgtgccacgtggtcctattttctcagcaatacttatttttattaatgcagctgatagaaaatgaggcaaattttcatcaaaaagcttgctaatgtaaaactgagagtaccaggcagcctggaataaaataaagaaacacaattgtaatattactattttgggagttttacattaaactcctacacaataatcaaaggtggaagtgtgatcataaattttagctggaatttaggaatgtggcagcaactctggggcacatttacaggaaaatcatagactcaaatggaatttgctgaggactatatatcaatttgccatcagagtagacagtattagaaaccctggactcttcccattaatcattgtagatgtggcatctcaaacagaagagagttatggcggttataaatcgtgcactgagagttgttttttactttagatagagaaaacagttgaaagagtttgggatagcagatgtattgtctctggttcctccttttagttttaaaaattaattgtgcatttcagaatcctgtactttaaatatttagacatggcaagttttaaaaagaagatatgtagggcacatacttctcatccactgctgacaggcatcaggaatggggtaaatttggataggagatgcttatccattctatgtcactgcagatatgaaattttgtcttattgttgttttgatttagcangaaatatctttattattttttttccaatgatgagaatggaaatgttgtaattagttaagtctgaaactatgatttaggaaagaaaaaaaaaagtgcaagatgatctattgcacagagagccacccagagcccatctgttggatagaataaggaacccctgtgggtgtaattggggcaggaagaaggggcaggatatggtggaaagtgcttgggttttgaagcccaacttgtttttgagtccacgttctatgtttttcctttgtgttcttgagcaagatacttaacttcaataatctatgatctatacattgggaataataatcactatctagaaatggtgttttagagattaacatattataataaccttggtaaagtatctggcttatactcagtagaagtatctgctttatacccagcaaatattccttttcaaatagatgtaggccactatgttataattaataaagcaataccataagcatttgaatgtttctgcacaatgacctatttgctgtcttttgttaaattttcttagttgggggagtgaaactcctgactagctttgggctggatatagcatagcggtgcccacctatgtggaanggtttgaagagtcctcgacagggccagtgacctcattgtccttcatagagccaaaaattgcgccagttacagattcagtcccctgagttttgaacaaacttccaaaatgccagatcttctattataatgcaagtattcttggtagttgagaatggaggagagttatgagagtgaggtgaaataggttaagctacaggttgcaaactcattccttgctcctcttgggaaaactggacagtcagatgacacattattgcctggctgcaattggctgcaaggggcagctgcccagttttgatgggatgcccactcctgataggatactgatccctttcaccttactcttggcattctttagacattttcactgttttcctggcccttgcaacacctgaaaacttatttgcccacagttaattagagaagagaactgacagatgtcagccaaatttagttgaaagcgggtagtctgtatgtcagaaggctctattgttctttcattatatgaggtagggcaggtggctgcatctttgaactctagtttcctcctctgtgagaagatggcttagaggttccacaatctctctactttttctcattctctggttcctgatggtgatctgggttctacctgaagggagcccaggattagagaaaggaagaatattacaggcaaactggtctctttccaacatggcccaatccctcttggcggaatctgcttcagggaagttaagcgtttgtctagaaattatgatgtcatgttacggagcccttattccctcctctataaaacaactttcctgttgtcaattcttctgtaactatgttatctactatgctgaccacagggtacatgtggctttccacattaatgaaaataaaagaaaataaaatatcctgttcctgggccacacaatctcatttccagggctcaatagccacatgtggctagtagctacttggcagaggagacacagaaagaacattttcatcatcacagaaattctactcttgtagagagtgctgctctagaagctttaggccactgaagttgtattcagcgacctgacatcagagagtttttgtagtcacttgagcagaggtaatgcaatccctggggaagacttccagtttcaattacattcaggttaacaaagcccattgttccaaccaaaataatagttgctcaacattccattctgatgattttttttatccaagcagtcaacatagtttcattaaataccacccactaattgtgtactagttaaatgaggaatgaatgtggctctgtctccagataaatgaatagagagagagacaaaaaaaaaaaaaaaaaaagaattggctgactcggggtgctgggtacacaaaataacttggttaggctgtaggatcagaaaatctctctagatcttttttctagaacttcctttttcctagatcttcctttctgaggagaatcgctcagttttaacaaagtggccagtttacactaaaatgcttgtcatttatataaaatattggcatttgttgcaatattgcaaaccaaagagtcattgagttccaaactaaacaaaagttttatgaaacagtttgtcctgtccaaccttaaaaagagaaggcatttactatatgccaagcattgtgctgcctgcttcacgtgcattttctaatgtgggtttcacaatactttcttgacaaaggtcagctgtgcacctacctgctggagagacagcatcaggaaggagggaaagcagaggttgtggagtacagcagactgggcttaaatttcagctgtgttacttactaaacttcaagactttgggcatttacttaacttctattagctctagtttccctgtctgtaaaatgggggacatgatacctgcttcatgtgattgttgtgatgattaagtcagacaaggcaaaggaagtgcttggtgcaagacctggcacacagaacatgaatacaggggaagaggtcatcttttctgtccctactgaattgtaccttgtatatattggacactcagcaagtatttgttgaatagataggtggatggaagggtggaagtcacatctacaaaacattcttcatctgcagaacatttcctgngagtgtaggtggttgcctaagtacaatgatttggggaggccaaaagtctcttattcaacctcaaacatcatcccactggctctggctgctattttgaaatttaagtattcttcattctattcagttatatgtccctgttaaaagcaaatattactttagagaaggaacacactaagctattgtgtgccatggttttggtccacctgccgagcctcctaagacagcactgtggagtggaaacacctctgatctgggagctggatattctggcctccagacctggctgtgctagcatctggcctttcctgggccttgacctcagatttcctantaattaaatggaggattagactagatcttctgtaaatggtttggtttctggttttataagtgggttaccaggcaagtgagttttcatgttgaggcatggggcaatgcctgggttggatggctttggaaggtggcaatgtggggattatagccctgcaaggacagggagcttctgtccaatgtggttacagggtgcctgataataanagcataagggacataccatgaaggaacaggggatcaacaatgacagttttaggactgtttcacagctttgttagataccaacctggtttataaacatcccttaggagtcttcctggatattaagcatcaacataagatcacctggaatgaagccagttgactgctccaaacgtgatcttcaaaactgggtgcccttatgcagcaaggcttgtgtgtattgtggaaaactgctccaggacattctgaagcgtgactgtccactcggtggtgcaaccacggactgccagaagctactggcctggagcaactggcctagcccatagaaagcaggaatgaagcagctcttcgtggctgtaggtgtcccacggaacaagggtagagccaattactgaacacctcccacatgccaggcaccatagtgggcatttcacacacattgtctcatgtaaactcacagctgttccatgtagtagacattactgccttcacaacacaaatggggaactgcaactcagagaggaaagaagtagaggtgagatttgagaagatttttggatgccaaaattcgcatgtcttcccatgtatgtcgcacaacctccaggatgttctgcagatatcacttgctgttatagttcaatgttctctacccatgggcatttagggtggaattattgttctcacattattgctatttcaggcattgctggaacaaagaaacaatcaccaccagtggccccatctactctgagagagagcgtttgaagtcatcagtcgtattttccagctgtcagggttccaatttaagttttatgttggatctttttctctttactcttggttgattggagttataatctgtgttttcnttcccatttttgggtattcacatttagattttattgagattcatttcatagtgctttaaaaggttaacaagaagcctgaaactctctgggtttcttattaagatgcagcagggaagaagacagagtgtttcagtttattgggctagacatatctgttgattgacgcagatgctgcaaacatgttctgggaaccatttcaatgttctgtaataagtagcacattaatcaggactgggcaaactggaggggtctcagcagggttggagtttcctgggaagtgcctattaagatgaagaattagccagtgctcacgtttaacangtagactcctgagatgcggcctggagggagatgccacagagtgctgatcaacattggtgcggatcactgacgtgtgatcactttcacctgtacatcattatcagttcaaagcctccccctgccccgtgggcttgccgtgagagggaggctccatcctcttttttaacataagggcaggagggtntgcacactccagagatgtgtgtcatttactctttgcagcttcagcaattgagtagactgaagaaagatgttcgtgaaaggtggacttttctttttatcatcatttgccctttttctagatttttcattgtgaagtgtgttatatattcaagactttatatcatgtcatcaaaagcctaaccataaaataagtcttgagtatgcccactgtactgtatggagcatgaagccggctttttgtgcagtctccttgttggaaccactccttgaaatttgggcttatcatgtcctgacttttctggacagttttaccacataagatagtttgctaaacatcttccccgtatttaaaatgtggcttttgtgtaataaagccctgtggactccatagcagtaccaagtttacaaaactaccccagtaccacggttttgtaaacagtacccctgtttgcaaaaactggctctgttttaaaatagcttagatggcctttatcccaagtgcttgtgttttgattattctctgatgcagaattaaatgaagaaatttgtgcacgaagcaaacttcacctctgtatcccccaataccacatgatctcggctcactgcaacctgtgcctcccaggttcaaacaattctcctgtctcagcctcccaagtagctaggattacaggtgcctgccaccacgcccggctaatttttgtatttttgttagagatggagtttcaccatgttggtcagcctggtcttgaactcctgacctcaagtgatccacccaactcggcctcccaaagtgctaggataacaggcgtgagccatcgcacccagcccctcagttttaattctataaattaatggattttatagtaggatgttaggacaagaaatttatatgtcattacatatacttggggattgataagaatttatatttctttttttttttttttttttttttgagatggagtcttgctctgttacccaggctggagtgcagtggtgagatcttggctcactgcaagctctgccttccgggttcacgccattctcctgcctcagcctcccgagtagctgggactacaggcgcctgccaccacgcctggctaattttttgtatttttagtagagacagggtttcaccatgttagccaggatggtctcgatctcctgacctcatgatccgtccgcctcagcctcccaaagtgctgggattacaggcgagaatttatatttcaatatagcagaaaactaatgaaaactttcgaaccccagtcccatccacttctgttttaccattccacattcttgtgtagtgagtatggttctgaggcagtggtcactttgtgangcagtcatgaaataaataggagagaatctggccatacttgtgtttttccagatccaaaggtaggataagcctcagatgctgatgtgaatttagtgaggggtcctgatatggcntgatgcccttgctgttactctggttgagcacaaatgtgtccttttatatcatatatccacttgagatcttcaaggcaagcaattgaaacagactttggctggcttaggcataaaagtaacttcttgagagataccaggttatctggtggactcactgtaaagttgtaggaaccagacttagaatatgggtggggaaaaagggaagccagagccaaattaaaagtcacaccagagagccagcttggggagccatcactgctgctcctgctgaacactgggcatggggccggcacggccactgctggtgttggccttggatacggttgcttggtgctgctggacctactggcctggcaactggctgctgccaccacagttgccaggatgaagtttctctgttctctgagccactggccccggatttgaagccccaggatggatgtatatcattgtctatgaccatgatctgtgccatgactgccagagagtctgaaaaagaaagaatctggctatcttgactgctgtaatggaaggggctttgtttcccactaagattcacatggcaggaaattcatcaaatataggaagggtttcagataccagaaggccacagtctgacaatacataatcaactcattttatctaaaggcattcttttgaacctttaattttccttcttgctgacatctttattcttttaagccccttattaatagtctgtatttcaagtaggagaagaaaatataaagagatatccttcagttccttttctttatagctttcttgaagtttctataagcaatactaagaggtaatatagcctctgtcacacccccaccccaagaaattggattggagaagtgaacacaccttctgagagtgcaactataaaataggcctagaatggatcagatgaaaggaaataaaaagcaattatttaagtggggcttagatgttgcttaaacttggcttttcctcctctataaataatcaaattatagatctccagggacctaaaatgttaattttgggatgtatgcctcattgcaattcaaagataggtgggtgcttaacatgaggaagtagagtttagtgattacaaacagggtgttggggttggacagacctgggtgcaagtccttgttcagctgtgtgacttggggcacatttcttcaccctctgagtctgtttctcatttgaaaaagggcagtggtaatctttatctcacagagttggtatgggaattgaataaattcatatatgtaaatcccatattaagtatttagtaaatagctattctcattctaattcctgttataggagaatagaggagaagttggttctcttaaagtaaaaatgggttgcttttggaggaaatgtcaagcagaggtcagttgacaatgcaatgggtgttgtagaggaagatctagcactggggagtaagtgtggtggactgagggatgtcccaggttcccttcgatagctaactctatggtacagtaactctcttgagaactcagacaaggattagtcctctcagctgggctactcctgatgttgatggtgaaacaccagccactcaggcagtgtccatcaatgtcaaccctaatctggaaatgaactgaccaggccaaggtagaagcctgttggtctgtccaactagtaacagatccgtaaaagtgacagccacttttaccaccatcattatagctctgaccactttccctgacttgatttggccaatgtgttgtgtgagtggtggatggaagaagctaatacagctatggccttcttcaataatggtgaggtaccactatcatttgcaaatcagttcaaaaataggaggtcttcccagctgggcactaagagctaattctcttgggcaattttttttattgcattcaaccatagangattaaaaaacaaaaaagaatggcattttctcctcccaaagcaaaacctcttggattcatggtctatcctaattatatcttctggggtaatcctgagaaatcttgtccattccagtagagcctgtgctgtgaatcanctgtaagagtgctcacctagttttgctacagtgcaagaatttcaaggtctaaactctatgaacaaattgattagggtaagttattgcctataatgtgattaaattatactataaggaattattttatctgatggttttccaacatgagagctcaggcagaatagcacaaaggatgagattatagatctactcatgattttcaagtacataatacactgttcttaactatagtcaacaccttgtgtaatagatcccttgaacttatttctcctagctaactgaagtttcctatcctttgaccaatatctctcccacttacaactctctgtccctagcccccagtaaacaccattctactctctgcttttgtaggtttgacttttaaaattttcacatatgagtgaaaccatgtggtatagtgtttgtttttctgtgcttggcttatttcacttaatatgatgtcctccagattcagtaatgttgttgcacatgacatgatttccttcttttaaggctgaacaggattccattgtgtatatataccatattttatttaccattcatccattgatggaaacttaggttgattccatatcttggctattgtgaataatgctgcaatgaacatgggagtgtagctatctcttcaaaatgatttcatttcctttagaaatctacctagtcatgggattcctggatcatatggtagttctatttttaattttttgagaaacctccatattgcttcccataatggctgcactaatttacattcccatgaacagtgtgcagatgttcccttttttccatattcttgctaacacttgctaacttttgtcttttgatgatagctgttttaacagatatgaggtgatagctcattgcagttttaatttgtaagggaaatgcacatttaaaaatactgtgagtgctagtagtaaatgtgggatcctaaaaatttgcattggaccacgtgaagaatttcttttgtgaggccggaaaatgggctaagagtcagaatgacctagtgttcgtctttgtttccatacaattcccaacctaccttgaggtccacgtctgaatttggctgttgaaggctttaattttcaaggaaaggaaaggtctgcctgggataagtcggccagcaagtcagcagaagcaagcctaagactaaggaaacacagatctacctgttgtctaaggccaagctggcatagatacctaactctgggtcttctctgtctgggggcaaaatctccagccttgaataggagtcagacctgttatggtggctttcacctgaagtcccatctactcacgaggctgaggcaggctcccttgaggcaggatcccttgagcccaggagtttgaggctgcagtgaactatgatcacactactgcactctagcctcgacaacagagcaagaccctgtctctaaaaagagaaaagaataaaaaaaaggagttaaaagttaatatagaaccagagagagagggaacaggtcttctcagatggggtaatccctggtttgactttccttctagccccatgagaagaagacccgtaagaaaataagggaagaagccaaagaaatatgtggcagggtctttcccaggtggcagcagcccaacccagttcaccttcctgacttcataaaggaagacacaggaggcttttcttatttttactcctctcattagactccaccatctgcaaaatgttgtctaataataaactctcaggatcatctattttaacatatctgctcctttgtgggaagagtgagtgtgaaaatttgggaacatgcgcagtggataaagctgttattttatgcaaaacagaaaagagcagtgccccctttgggtggatgtagccctgtaccagtgcacacagcttggtattctcaaagaagcccacaaaacaaccaaggaggctgttccagctgggcactagtagctgattctcttggtaaccgtgggctgggttttagctntcacatgcctgcttgagcggagtacctttgtgtggtaaacaacctggaccactctacatggtcccctggtggtggtaatgggcaggcttaagcggtgtgatattggttagggggctcaaacaactcatggaatgggcacctaagcaaggtagagagatgcagagcggggagggaggagttctgaaggggagtttggcttgtttgctttttttttttttcttctatcttggcaccctttattaacagaacacagtgtagattatgcattgtattttgaaaaagaaagagaaataaaaggcgtaatctttgcttttgagatgttttcagtctaactcagcaattcctttccctcatcctttctgcctcactacttattacatttacttctagttcttcctctttaaattgaaaaagcagaggcaaaaccagacactgtgataatggaattttatgttgtggtctttgattacacttcccttccaaagcttcaatatttcacattgttaataataatgttctttgtaggaaaaaatccttaatttgaaaatgttgcagatggccttttatcaggagctatggactgtcaaaataaatagatataattatgaaccattgttgttgaatgggccatcttaaataatagcagtcaagtttccagaaattaaaaaaaaaaaccttacattttaaaaagacctcagaataattagtggtctctggttgattggttttcaacaagttattcagcagatggaggctgtcagatttctgctggtacgattatttttgtaactcagtggtggaggggggtggtttatgcaactcagcatcacctctttgttgaattggatttggtttaagagaatcccaccgcacctgtacattaagatggagcatgaggaaggtcttgggaccgagccatttgaagaaaatctaggctcnggtgggtcactttaggagtattagtatagccttagacattagctcttggaactaccctgaaggcgaaaatgtgagacagctaatatttctctgcaagaattccttgggttgctgagttttggttcttgccatcaagaaaatgtttgtaccggagcaagatgtggaaaaccccagatgagaggatattaatgtagattcatgagctctgccaaagtaatgtcattactgctgctccatccctgaagaaagatcttaaacatatgtaaatagacaagacaagttataaattgtaatttagtatctggtaactgaaagtctttacttcatttgtactgagtgattacctgaatttactaaggaaaattttggaggtcacagatttgagttgaagtcaataaaataggataaaagtctagatgatgaaacttagcttttgttgattagagttctgtttagctcttaaaactgcagtaaataaaatgttatattagtggaaaatacaaatggattcagaaaatatagacaaatcgataggcaattgaaatgtatacattttattttcaacatatcaaacctcgagttcaaagttcttcataaaaacacaattcctaaattaactttacaataactgtgagcattcttatccccatttcagtgctacaaacccaagttatggggagaaaactttaaaaggaggcaagagctgccactataatttaaaatatattgttctccactctttttacatattcttgaaagcagttcattaacggtgaccttgtgtaggaaaaattagcatttgtgccaaaaaattctttgtatgtgttagtttgtgtgcatattttggagtcttcatgttaaaagtataggacagacctacttgacaaaggtgaattttgtcgaaattttggggagaatatagatttgaattcatgtaaataagattgaataaaaatccagatgactgaaacatatttcatcttttgctaattagagctttattgagcacttaagctgcaaaaaataagaggttatattagtagaaaatacacatggatttagaaaatttaggtaaatctgtagataattggaatataactcaggaaaacattcaatgaaacctctttttcaacacatagattagtaccctaagagagttaaattagtgttttactgtgaaactattttcttccacaccagaatctattgtatgttggcaaagaaaaatggactagccattcattatcaccaagagtttattacttactctggccacctcagtgttcagtgggtacctaaagtgaaaagagttttaagtgctacctttgcagtattaagtttgagtgaatccagggatatttgctgtgagtgtggcaaaatgattattgtggaattggttgttgaatttgaattttttgttgctggcaaaattcacattgccaagtcctccttttaaattgaagagtattttaagtgaaatgcaatacaaacatatcttattccttgaacttcttgattaaattggtagtgttttttatttgtagtaggctacttatagagttctttttcataaaacttgaaggttcttcttcataaatcttgcagcttcaaggggaaaaaaaggaaaaaagaaacttatttcctcttagacccttactgtcacacctcaagtattggacacaatgtgcgatgcttaaagactctcttggcttagaaaagcctttctcctctcttggcaaatcaggcaatgtgaaatcagtaagggcccagttctcactgttttcctatgaagttgttccgatgtgtgacacatccaccttatggaggtttaagttggttgtgtcttgaggctcacaaaagcaggttgtggaattggtataagcatttgatttatttgaacatatctggtggtgtgtcattgactgacccctctgttataagctttccttcaaaaaaagtccatcagagacttgaagtttcacaatcaaagctttgtttactgggcatatttttcagcctcaaggaaatcttccctggctccctgtagaagcaatagttacaccttccttaggggaagaacccgtttaaatgtgttgcacatcttcacctcttttacttgaataagaagtttacaatcttccctgtggtatccttcttaggggaactctaggaagaaatgtttgatcatgagagtggtaactggaagcatgaactggagtacggtgttccccatttaaagaaattttgcttaaatttttttttaaatggctttccagaggtcaggcaaaggccagtttccccttgatattgggaatttcagggtgggattaacaaaaggctagaaaatgaagatggaaagggatttatagctacatagcagcagcatggacaatttcctaatgtgcatctctaattaaatattggtgtattagcttattaattacttcaacaaatattcattgagtatctctgccaggcaagaatctgggcaccagagttacaaaagtgaatgaggcacatttttcttcctgagggagcctagaaggaaatatacaattaactacagtcattgtttctcacactaccaaatgaaagaggtgaggcttacctgtttctcaatgtcgtttttctgaggacaaataaatgaagaaacttcaactagaaaaaacaaaaatcatattcacagttggattgtctgtacaatattgtcatcagtaaatcatgtaatggtattataggacttggactgagtgtgacattgccaatttcagtttgtaatttgttcaaacttgcaagtgataatgtggtactttattttgaggagcaaaacaataaaaaccatcagtacaaactcagggtatctttggtcctagagatctctattcacaatgattccttacactgtgtgaagtatgaaagttctataaaaagatttctccacaattcattttataatagtcctgtcagtaggttttattaactctacttttctgttgaaaatatggagtctcagtaattgtgattgagttagtcatcccaggttataaaaccaacagtttcagaagggtcttgaatgaaatatcttctgcctttcaatccagggaagtttgtactatacctcaacaaggactaaaggtaagggctaaacatggaacatcacagctatcaaattgatgagagaggccttatcacttcttaggttgctcaagaggatgatgtgagcagaataatggcccccaaagaggtttatgttctcatctctggaatctttgaatacgttataggacaaaggagagttaagattgtggatggaattaagattactaatcagatgatcttataatagggagattatcctggattatcctggtgggcccaattcaatattttaaaaggtaggcaggaaaagagagggaattgtgactaaggaaactaaggggcagtagtcagagggatataacattgcgttctttaaaaatggaaaaaagggccacaagccacagaatgtggatgatctctagagctggaaaaggcgaggaaagagaatttcccctagagcatccagaaagaaactcagccctatgaacctcttggttttagcccactgagactcataggacttctgtcctatggaactgtggcatgataaacttttgttgttttatgccactaatggtaatttgttaaagtagcagtaggaaactaatctgcggggtggctgttagagcctgatttatagctatctaccttcagagcagacagtgtgactgggagccccctgtgatcaccatgtggggatgttataggttagatcaatcatttattcaattatttattaataaacatttattgcacatctacttggtacaagtcactgttctaggccaaacagtaaacaagacataaaaaatcttgccttcatgaagctatcattgtagaaggggaaagataataaataagtaaaatgcatcatatattagatagcgataagtgatgaggaaactgtgaggaggtaacagtgataggaagcagtgtgtgtgtgtgaatatgcatgtgtatatgtgtgcatgtttatattaggtttgtaaattttagatggggcttctagggcaggttcactgagaaggtgatatgtaaataaagacccgaggacttcttttaggaaggaagaaacagccagtgactttctatcccaagcaaaggaaatgcaaaggctctgagggcagagggttcctggcacgggagggatgggagatggtgaataggtgagaatgtaggtaaaacttccaaggtgccaggttgatttttttaatagtagcttatattccccctcaggccaagccttggagattttctcctcagctggtggttcttgttttttttttttttttaaattatcatttctactgcagagaaaaagcagaccatttccaaagggcagcctaagggagctggaggcagagagtatcagagagtgtttcagtgctgataaccaattttatggatcagtcattttaattaataaggagaatgggggaaagtgatgcaaacaatgtaagtcctggttggcatttccttgaatgttgaatacctcttacttttcaaagggtaaggaatttggttagtgactggaaacaggcagaattggggttgcgctaaactcaaccagaggtcacagagtactgttggcaaaggttggcctctttttcttgctgcacgtggctcgtatttaatatactactgcagaataactttgatctctctgcctttagacagaagtcaccaccactatccccctaaagctattggctagcatttctttaaacaagcaggctgcacagagctcctcatgtgactccagcaggggaggaagggaggaagttgcatgggttggacacccagagctaagaagtagagagatgtaggtagaagggccagccaattggcagcagtaggctgcaacagccacacacttgccccgggaagtgggaaataggagggatgctagagcttggtttctaacatggcaaagatctatgagagcgagagagaatagtaatggagtaaaccaaaggaagaaataagatgcctccagagggatatggcagctttaaaacatggcctcaaaatcctttgacactccttccatcaagaaatggggtctatgtctcttccccttgtatcctcttgtgactgcttgaccaatgggatggggtagaggtgtcagtttctggtgcagaccttcagaaatgggtcgcttctactttgtgtatcctgagaggcttgctcccagaacccagccaacatgttgtgaagaagcccatagaaaggcccgtatggagaggaaactgcagtcagccatgtgtgagagtcatctttgaagcagatccttcagcctgtcaagcaattccagccgacattacatggcacagagatgagctgtgccttctgagccttccccaaattgtagatttgtgagaaaatgaaatcactgttgttactttcagctactaagttttaaggtagcttgttatatgtgaacgattgtaacagggtgcattttaggtgactaggaaagagaaataccaggtttcatgcaatattgaggttgctttgttattcaagtatataaaatataaatcatatgattaaaattttttaatcatttagagtttttttattctctccttcgaaaaatgcacatatgccaaccttttgaatacagtttcaagagtctgaataccttctacatccatccatgggcatagactccaagctgagaacctctgtggtcagaatttcttctcactactgtgttataaagtgcaatttggtgtaagcttagggaaggaagagggagaagacactggactttctattgttagacttgtattttattccaatcctttcatagatttgctctttgattggagataaagtgtaaaacctctctatatcatattctatatctatatgatattctatatcataatttcttggatggcaaaatgtggattaaaattctgtcctttctttcctcaaaggaatgttgaaattaaaaaaaagaaaaaagaagtgaatatgcttagaaaagccataacttgcccataagaggtacacaatgaatatttgttgaatttttagctgtcgttattgataatggattacttaattaggtcgctgtggtgttatgatatagatacttgttttcatccatggttcctggcttctagctcccataatccttgttataatgttggggcactttaggcctcaggaaacggaatctttccctctaaccttctcctgtcctcctttcacttgcccaaggcaggactctaatctgattgtcggtcaaaataccctcattccagatcctgtcctatgcaggcacatggatgaagctggaagccatcatcctcagcaaactaacacagaaacagaaaaccaagcaccgcatgttctcactcacaagtgggagttgaacactgagaacacatggacacagagaggggaacaatatacaccagtgaggggagggaacttagaggatgggtcaataggtgcagcaaaccaccatggcacatgtatacctgtgtaacaaacctgcacgttctgcatatttatcccattttttttttagaaaaaataaagaaaaaaccccaaaaaaccaaaataccctcattccagaaagagtcctgctctatacctaagaggaatgaatgctacacagagaggccaagaaaagtctgagtagataggcattgatgggtttagatcatgcactttttgtccaatcacatttctacagggttgtcaatcatgtttatgtaatgaagcctccataacaacccaagaggattgggtttggggagcttccagatagctgaacacgtgaaggttcttggagggtggtgcatctacggaggacgcagaagctcatgcatcttccctcatacctcaccctacacatctgtatcctttgtaatatactttataataaactggtaagggtaaaagtgttcccctgagttctgtgagctgcttccaattccagttaatcaaacccaaagaaggggtcatggaaaccccaacttgaagttggttggtcaaaagacaccagacttctgactggtgtctacaggtggaagcatctttgggactgagccctcaacctatgggatctgatgctatctccaggtagatagtggcagaattgaattagaggacccccagttggtgtccactgcttgatgtgtgggggcaaaactccacacttcgggtaacagaaggcttcttctgtgttgatgactgttgttgtggtggcgtgagagtagaggaaaaacacggtttgagagagcttttcctgacacagaagcccagacctttaagggcaaagttttgtccataaaacaaccctagaacaaggtccccagggaaaaagcaccaaagggtataggagtggaaagagggggtcagtacaggcatctctgcccctgtcacccatgttacattttaccctctgttatccttcattttatagtcagtgtaggggaactaggagaaatggtaacacgcaaagattggtatcagtttacaccaaaacagaacacactgctggtgagcacagggagttggaaacaatatacacaaaagtctcacaaaatagaaaagaacatggatactggctctaacattgacgtcattgggatacaaagtctatttacattgtttcttatgaggtcagcaaaacatttcaaatagcaactccttggctgcctgcagtgggtctgcaaatgtgaaataaaacatgaactgcagacctgacttatgagcaggacgttccaagtttccttctttgctttttctgtaacagatcaccttgtccttgttactgcattggtagatttttatcatctcagatgaaagaatcctagtgttggccagggcaaatccaaaacacaggtgatgagaggcaacacccaatgttaaaacctgatccactgtggttatttttctttcccattgggaaactataaggatgcaaatgggcaggagagtaaaagcagcaatcacgtctgcatggactgaaggcaatttagtttctatcagacatggtgacagtgatcaatgcatcacaaaatcacaaacaacagatgccaagcacaaactgtgtcacagatcccagatcaaagatatctaccatatgtttagctttcacatcaatgtacatcaagtcagttttgaactagaagcctttagatatacagttcattacttctttctcctttttcatcctcttttgtctccaggaagttcccagaatccgaatttaatcattattcaggtttgggtatatttgcatataaatgcattgcttgtgatggatccagtgaaagttcatgcgcagggctgcccctgcccaatgctgcactggctttctgccccatcagtgctggagctggcagaacccccctgcagaggaacggaagcaagtgacctagaggggcctgcaaagagtcttaggagggcaattacaacacgtgtttcttccttttaggagtatctaattgggttcaatgtgaaggcagctcactgtcaggcacatagaagagactctgagttagagaggttgaaatgtggtcacaaaatatccatgaatgtattaaatccataaggatttattaggggctcttaagcatttgattccctttaaggaaatcactgctaataaagaggcacacagcttgagaagctgaagcagagtgaaaaaaattgatttatagctcataggtagagaaagcaaaattcctaattagtcatttttttttaaagcacgtactaaagggaaaattactatatatttttttccaaagtttccttggtctggctgttgtttgccattttaattacagatttattatttattttgtataatatataactcaggaattattattatttaatttttcctcttttttttgcattgggcttggtgctggggaaacagagacaaattatgcagagtcctttcttgttgggaattcacactctggcagcctggtgtagccatgtgcacaaacaactactgtgcaatttgatgagagagacagaaggcagggcagtggcacaggtggaagtgcccagctagggtacaaggaattgagggaaggctcttgagagagaaagagatctgagagctgtatcttcctaaaaagttggtgtattccaggtagatgaaaataggattgggagacagaggtggacattctgagaagggggagtagtaagtacaaaacagaggtggcaatagcattatggacttggggaccgttagtaggttgataggattatagcacataaatattagaccagaaagactgagaaatgatgctggagaagaaagtaggacacaggtcatggaatgacttgcaggctgcaccagaggcacttggattttatgagagccttggaaggtttctgtggcaagtgttgccagtgcccctctcatattcccttggcagtcactgttactgtacaagacaacagctacaagtctcagagactacaagtttgcaagactgtaatgaggcaggcccaaagcaccagaagttaacatccttgagagcatcgctcagacaatgatgcatgaatagctcagattcttcacccctggtgaggatgagtctgcagcaggttttgtataatatcttggaggttcccggtgacattgagtctcacctgatcacagcagttgtctggtcatttacacaccagtattgttccttcccatacttgccattcttccataccctcctacattttgcttcctggaatcccttctcgaaaaactactcatgcttaaattcttagctcaggctctacttctggtggaatccaatctgggacaggtttttggcttgtggaggaacagtggcaatgaaggcggagtctggatgattttcatgagaatgcaagagagagtggaagactctggttcaatttagaaagcacagttcgttgcaattatggccaagctgtatgtattctgggagacagggaaggacttttcgatgattcaaggtttaggtttgttgactggtgggatccattaagcaaaataaggaatacaagaagaggaataggatttttggtgaaatgtgtgggatttggatttgattatgctgaatttgaggtatttccatggacagtgtaggcattggggaagaggactagttgcgacaccccagtttggaagctgagcatcagcccctgagtagtagtagaagaagtgggtgtggctgtggtcactcaagctgagtgtggggatggggagtaggaagaacccaacagaaacaaacttctgggagtaccaacctttaacaatcaaatagatgaggaggaacttgctacagtgaaggagtgatctgtagcaccaggcaagggccaggggagtgatgtcgtagaagccaagaaaggaaatcatgtcaggaggagagaggaagcaaacagagtcaaagactgcagagaggcttggcaaggtcagacttcaggctcccattggatttggaagttgagtggtcattgtttatttaagaagttcatactaatttggatcaattagaaaagtagtagagattacctccacttaagacatttagttttattacttgaaaactaggctaaccaataattgcctaggacagggattgctttaatgaataggtaagaataatttctaattatagggtggcatgatttgcgttaccatactgaaaaatgctgcccctctatttgtatgatttgtatgaagttcagtacttggaaagcttcaagtttgttcacctaattaggtaagggtttttcttttaagctagttgctgttttttagtttcaagttggtccctatttctgtttgaattatcacaggtttcaattttatgttgccaaaagataagatttaataccatagctgatgcccctttgaattttgaataacaattctattttctttatactatttagttatttgtggttaagaatctggtctgtagagttagactgcttagctattacagtagcttcaacacttactctttaagatccctgggtaggtactgtgcttctctgtgccttgatttcctcatctgtaaaatggagagaatacaactttttttcagaagttaattcttagtaccaaatgagctaattcatataatgtatttaaaggcattttaaatggcacagagtaaatgatcagcacattttagcgttagaaatatttgttagtattttttctatttataatttgttactattactaaaaactgggaggcagaatagtataaagtgataatgattgaactataaaacagattagggttctgctctcaaattttccgccaactctctgaactgggacaagtccattcacctctctgagttcacattcttcacctataaaagagggaggttagaatagaacatctttcaagccagccttagttttaatattctgggaagcacaccttttgcttggaagtagctgatttacacagtagtcttagctgtagtgtgttttcccctaagggaaagataaatgggctaaaaggagaaatggaaggcatttccattaggcaattgctttctggaaagtacaactaatgttttggttggtttattttcatagaattcatttcttgggctaaaacataaatcagttactatattcagagggcttatcatttcttttttgagtatacttatggttggaaaaattccaagtgtttttcatttttttgccctgttttttcataccttttacagaaaaataattgtttttagtgcattcatttcatttgctaatgttataatctgtacaaaacagcccacctaattattcttttagatgttaaacatgacacatgtaaataaaatgataattatagaatgtggtgttttcttgtatcttacattttttagatctgaaaattggtccctgttcttattctgcatgtactccagtgaaactttcccttgatgagttatttttcatgcgcacacatgggggagcttttgagacactagtttgaatgttacactttgaagactttctcaacaacttgaccctaagatgatggactggaactcttcattgaaggaagtgtagcagggtgcaactggctgtagaactgacttccctagcgctcactgtctcatatgcagccctagaaccaattcataaatctctttgaaagatagccataaacatgtattctctcacacaaaagagtagggctaagaaaatgaaaacgaaaagtgaaggcagatccagtattttctaaaacttcagtaagaagtacctgaggtcataaacttggggggctgcctcttccggtgaaatgggggaagtcagccagaaactctgattttgacagcaacattatttaaaggagtttctgaaatgatcaaacatgttcttccatagaagaataaaagtctaaaagcacatgagaatatttttaaaaaatcacctctggaggaagcagaaacaaaagtgagtggcttgagttgagtccgatgctcttggtgtctagctctgtttgccatttaaagaaaatgcagaaaaatagaaatgtgttaagtgaaatgaaaccccataggaccttgactgactttattgttatctttcttttgaccctaatttttggggtagctaaaaccgcaaataaacatatagaaatagacctggtgttagccacatagatacatgaagtagcatcaggaatgactggggcttttctctgccccagtttatttggaaataactccaaactatttcatatataaatatatatatatttcaatgcttatcataattacatctgaatattttgctcataagacaaacttctaaatgcccttaaaatgaggcttcaatgaggaaataaatacagctgattttaaaatgttatttagtatcaagaaaaaactctttagcaaatatttcctgtgaaaagtatacagtataactagcttaatatataaaattaaacagaatctttcatgatgaattgaaaataggtaaaatttgttttccttctcattgttttttcatatgtagacagccaagtttcatccttcacagtttgtgttcaactccttgctgtttttttctctaatcttttcctcagtgccttattcattctcatggttttaaccattaactatattcccattctgggctttcatcacagattccagttgtacattttctattgcccattggatgttcctacctggatatggaagtcaaattgaatgtcagctaccaaatttaccttccatcctccacttgcttcctcggcttctttctttacccaccctcccagctcaccagttccttctgactttcccgtatctgttcactaaactaccattttctgaatcacctggccttggaaatttggtgtcatctttgacattaacctgtctcatgtacactactgtatcaggggttcccaaggccaccctcagacttgctaaaaggatgcatgggactcagaaaagttgttatagtcacaattatgttttacttagtgaaagaatacagactaaaatctgaaaagcaaaagatatgtggggaaaagtccaggagaaattaggtgcaagcttctaaaagtttttttccagtagaattgcacagatgcacttaattctgcaagcaataccgtgtgacatatgcaaagtgttgtcaaccagggaaacacttgagctttgatgtttttaatggaggccagccacatagtcatgcagcacctgtatgacttacctcagctactcagacttcagctcctcagagaaggaacaggcagccatcatgcatcacattgttagcataaactatctgatcaaactggtaccacatgctccaaggcctgaggcatacaacactcttaccaggcagaatatacctgtggctcaaggcttactctcaggagctggcctaagttcagtcttgaagagaggtttttcttgggcatgtgcagggcttgagccacctagatttgctgagttaatcttactacacatgcacgaaaaatcaccaagctttgttggttactgggaaaattcagagcacatactgtggtgttagatatgtgtttgagttctgcctttgagacgattaaatgagatgtgattaacatactgctggacacataaatactaagtgatgtcgatttctcgttgttgtgatttttattatctctgcccttttctatccaatatcacttcttatgtttagcctaagaccttattgtgttcaccttcaaggtgcactagcttcccatatcagtgaacttaggatgttacgctgcgctaacaaacaatctccaaattggtatcacttgctaaaacaagagagttatttcttgatgctgccgtttgtctattatgagttgactgcagctctgctccaaagtataatcattctgggaccccgactgaaggaacagccctgatcgggacattggggcaaaaagaaaagagcgtattatagaaccataaaatggctcttaaaattttgcttgaaagtggtgcatatactatgtattcccattttattgtctaaagtaagtgacacatcccagcctgaggttattggattagggatgtatactattcccttggaatgtttgagcagtaatataatctatcaacttcctagctagcctctgtgttaaatgatcattagagtatctaaagaggctggaagcagagaggccagctaggatacactaatctatcctgctgaccatcactaagttcacatcctcaaagttcagtgttgacaaaccatttctgttctctataactgccgtatcatggtcttctcttgattagtcacgtaagctcatttttaagctcaatcacccatgactttcctatacgcaagtgaaaccataaaattaaccagcatcgggcacattttatcttagcaccttttatacctttgctcatactttcactgagattgagggctcttttttgaagatagttaccatttcattcacctttgaattctccagagcccaggtaccttacctgtggtcatggctgaaacatgtaatcaattaatgtaagaagaagtattgtcccagtgtttcaaagaaatccaggtgctattcaatgacagtgagacgtcaggccaagggggtgaagggaggctgaaacccagtccatgctttgctcacaagccaagtcctgagatgggatgaggagaaagaggtgtctttttctaatctcattaaagcactgagtagtgtggtgggggcttttcttctggggttttgtttactaaaagacttcctacaaagaacctgtaggccccacaaagatcatatgcatggacattattgtagggcagcaggagaaaaatgctattttggttctgctttctagaaattttcaagtgctgggctaccaagtcaactagctcctctgcatcctttagatgtctgtggctgaggacagcttcatgagattgggtcctcagagctgctttgcacttcccaagaatagacctgtggaccatgtcctttttgtccacccaagttttatttatttttgggacagcacctcttttaccagagaaagtaactcttgcggctaaaaatataccggaaataagaatgaagaaaagtaactggatcagctatacttggtaaaaatacctaaagctctgtttcatgaaagtgtttctaaaaataaaaactagtccctggcaatgcagcaaatagccaaaacgacttctttggttgattggttttaatgttttttttttttttcttttcctggttacagttttaaaaactgctccacaagaaatttcttccaaattcagtgccaatagggagcattgcctattagcaggcacacaatagttaagagcagaaaggcatgcaatagggctttgattgtccaaggcagggtaaccatgtatgtaggacctttattgctgcctgggaggtgcttcagtgtggggagtaaatgctcagtcaaatttggcataacagctttaaagcaagtggaaccactgtgcatgttgtcagcaacatactgctttctttctttctttctttctctctctctctctctttctttctttctttttctttttagtttttgagtcggagtgtcgctctgtcgcccaggctggagtgcagtggtgctctctaggctcactgcaatctctgccttccgggttcaagtgattctcctgcctcagcctcctgagtagctgggattacagatgggcaccaccatgccctggctaatttttgtatttttagtagagatggggtttcaccatgttggtcaggctggtcttgaactcctgacatcgtgatccacccaccttggcctcccaaagtgctgggattacaggtatgagccaccatgcctggcccttttttttcttttaaaagtattttacttatgtttctattttgtgtcaagggggctggttcctagattactgagggaataagccaaacagagcaaaatttgtgtcactcatattaaggtattaatttcagcactaatgagatgttgaaaaacatggcaaaggtgattagaggatattgaacgaaggtaaattaagtaggtaaacttggatccttatgttcggaatcctggtattaggagtagagtatggagctaattgcactgtggttggaaagggttttaaattatagagaagatgaagtttgatcaacccaacatgtgtcccctttactagtgggaagacacaagggcattcatgtcaccatgaaatattcttattaatttattgaaataccagtgtatttgtggcattttgggattactatcattaccataacagaactgttcttgcttcatatttatgcgctccaagattgctctaaaattccttcatatccaactgggcaattatgattcacccattggacaaaacaatatagttctattctagcactcaaaggatgtagtcatcacttccaagagtgagcagactttctggagccaggtcagaaagagacattaatgttgtcttcatttaaatactatgtgtagaaaagacctatgtatttcccattgagaagatggatcatctttttcaggaattgtttttcatctgtagtctcatcagatcctgttaatatattttactttgcctttgcttttttttccatttgaatatatctttttctcctttcagcatgatgaaacgtcatttaattataaatttttgtcttcaagacctccctttaagcctttaacggggagtaatataatgactactggtaggtacagtcagtcagtcagttacctctgggatcattctttgcagttcttggctcttggtttctgtaggagttggcaggtagatgccaaattttctgtctgagtggtcactcatgagatctttgactaaactcatggattgtttcttatcgaggcctgagttggccctgttgtctgttttggctaataaacaatatttggtcagaatttgaagctgatagctttctctcaatgttctaaatagattctattcctttaaagtggttaaagtagaacaatccttcaatcccttgatctgatttatggcagtagtaataaagaggattgttaccccaaatgggccagttgtttatgcttgtttattcatttattctggaatgtttgagtgtccacgatatgctgactctgtgctagatactgggggttcagtagtgaggtccaagtcagatatagtctttgtcctcatagtgtgtaaaatagtgaaatctaatggggaatacagaaataggcagtgacaataaactgtattgtgaggaatgctataggcgagaagcacagtgagctcacaggaggcacatggacaatatttggttgcctgtgtttaccaggaagtgtgctaaaagctgagtttacagttaactaacaaaatagacactgtccttgccatcgtgaaacttactattggtgaaagtcagtgttgactgaataattacatacatgcatacgtacgatgttgctataaaggaaaacacaagttgtgatgaaaggctctatcaagggttccaatttagactgagtgttgaaggaccatggatcagaggttgagacatttaggctgagacttatcatttggagatagtcaacaaagaggcggaagagaaagtttccaggtggaaagaacatcacttgctaaggcctgggacaagtgggaatgggagaatgtattgagcagaatgtttgctatggttatgtcattgtgtgcagtgaggggtagaggcagagggaaggaccagagatgccgatgaagagtgaccaggatcacatcaccagagcctattcaaccacaggcaagtgtcttgactttacctggaggggaatggaagagctactgagtgttttaaacatgaaggacatatgagcagattgatatctttggaaattcgctgtggcttctgtagtagattgaagtgtgggatgcgttaggaggcctggagactagggagtaggaggctgttacaggaaccccggctaaacagttcactatagagtaatgctgggagtgtgagctctggggccacaatgtttgggcttagtcttacctgtgtcactcaatagctgggaagctctgagccattacttttcttctctggcctttgttttttgcttctgttaaataaggatgatgataacaatgatgcttatctcatagggttgctgtgggtttatcaccatttagtgctcagagcagtttgtggcccattctgggactctgatattcataactataagataataaatttgtattgcttcaagttactaaattggtgacaatttgttaagcagcaataagaaactaatacaggactttctgacgaggcctgacagttgtaagctgtaaaaatctgggaatcaggagatatatatacgtatgtttagatggagtcttgctttgtcaccaggctggagtgcagtggcgcgatctcagctcactgcaacctccgcctcccaggttcaagtgattctcctgcctcagcctcccaagtagctgggactacaggcgcgtaccaccacacccagctaattgttgtatttttagtagagatgaggtttcaccatgttggccaggatggtctcaatctcttgacctcatgatctgcccaccttagcctcccaaagtgctgggattacaggcatgagccaccatgcccagctggtagtatattataaaagaaatgatattagatacactgtattttgtgtagcctgtgccctccaaaaatgctcatggttgaggggccagtacaggtaggaactggctttcactgataagccctgtgcctagggaagagactccttttgtaatttatccatgtaaaaggggcatctttttcaaatttacacatagtcactttgggtagctaatggcagccctgcctggcacaaattaagtactcaataaatgatatctgttactaactgttgtatgtgaaaattactgaacctttctatgcccattttcttatctgtaaaataatgatccctacataataaaattggttataagaattatattaatatatgcaaaacacttaaaatagtgcctggtacaaataaggcatgccaaaaagacaaataggggtagggagcattcattcattcaacaatgtttgagagccagctatgcagaagcacagggctgtagctggggagaaagagacagatatgtccctgtcctcatagggtaaacaaaaatttaccctgataatgatttaaagctgtgatgtgttataaaaatgaattctaggaaatgtagacaatgaggaatatttgagaaagtttagaagtagaaagaacaagactctgattaaagaagctgattccagaaagattggaaaggtttcaagaaggagggcaaggttggccatgttgcccaccttcagagctagaaccagattacctagctaactttgtctatgacttaagaaatgaactgggatagaaattaaaacatgcaataatatatttagcatttatttgttgcactgtaaaattccctaaaggttataaagaaaaaaaatatacgtatacatatatatgtatatgtgcatatttcaccgatttttaagcatattatataacatgaaagatttcttacttaaaattatgaagtagcaaatgaagtctggatcctagctcattacagatatttcaggattggatttaatttatcatcttttttcccttttgaactgggaacaatgccctgatgatctatttggagaagagatatgatagtatcttacgtgacctgtgcttgctctattctgtttgctgtttcctgtttaattctgatggtgttgtggataagtgagatgaccttccctggagcaatttatgaaagcactgttgaatagagaacagaacatggtggaatattcatgggcgacttcagtagttcaggattactctcagaccgaattattcttcggagctttgctgagggcttagagtaccctaggcaatataaacgtttctttgatatgctcctcagtatttcttctttttaaagaatccccaagaggatttgcacctgaaactgtagctagtgccattcttttttgctctcctttttctcctcccttctttctaacaattcaaaatgttgatggtgtttttttggggggagagagatggcaaaaagtgtccattggaatttataggcatgtaggagaaaactgctttcccatacaacattatgatgccaacactcagttgtcattttgggggattgtttttgaactgaaggaaaatgtgtagcagcactattggataaatcagcaatcctggctcacctgtatctttcaaggaaaggaaggcttggtgacagtgttgagggctgtggtagtcacaataacagccactcaaaaatgtctctggaacccatgaatatattttgacaaggggggaataagttcatcaatcaactgaatatgagatggggagattaccctggattatctgggtgggcccagtgtaatcacaagggtcctcaagatggaagaatgaggcaatagagtaagtgtcagagtgacgcagcatgagaaagtcaagcatcacccagtcattgctggctttgaagacagaggaaggggccatgagccaaggaataaggacggcccttggaagccagaaaaagcaggaaaatagattctcctctggagcctcccagaaactaatgcagccctgttgattaggccaaaaagatcccttcttggcctctgatatccataactgtaagatcataaatttctattcttttctcactaggttttccattaggtagttacaatagcaacaggaaaccaatataggagctttctgaagagcctgacagttgtaagctgtaagaatctggagatcaggtagtctatatttgtaaaataagtgatattaaacattttagaagtggtttgcaactctcaggcaagtcatcattgagttcaataagactctagagaaagaggtagcaactaaacataatagaaaacccatcaaggtctatacacgtagagtaaatgaaggagactagcctggttggaagagaatagaggggcaggggagtgtggctgaccagagagtacatggccagctcctcatggtgattgttgccgtgaggaaatgtgaccacttttgctagatctagttttttcaaaagatgcccgcattttgaaatgtaatgtaaattatcctaatatttaactctagacaatttaagtaaaaaccaacaaccaaccaaatgaacctcaacacaggacgggtatggcccgtgggccaccagtctgagacagctaatctagaattgcagtcagccggagtgacttgtattttcacggttctgagtgtaacacccacagttccactttagagttgaagaaactgacgtaggggagttaataattgagctagtcaatggtaaacataaggtttcaaattgcggtgtgtctgattgtgaacgccaagtttttttccatctcactgcctctaaggcaaaggaggagattaataatggagagataaaaggagaaatggaaggaaagagtttaatatttactaagcacaaaatatctaccaggcattgaaccagggattttaagcacattatcctttaagtctcacaacaattttaagaggtaagaaatattctaattttccagggaagaaacctgagtccgggagaggtcaagtaacttgtacttggtcacacagagagtacgtgtcaaaggaaactcaaaagaacacattttctcagtgattacaggttttagagaagaggaacaatgcttcctctgagcctgaagaaaagaatgaaataagggctgcaagggaacatgcaggtttcacactacaggagcttgtctgtcttggtgcaagtgggaggtaaggctatctggtaagcttaagaatagtttataagggggaagcaggtgtcagactggatattgcaggagaaaagaggctgccaccagggtgacctgtacaggagatggagacatgatttggaatcaattggtggaccattgagaaaggccaacagacaggaaggctttgagtggaaagaatgtacagacccttgcttctttcctcagcattccttgcaggtggtaaccagagaggagctgagtgccaggactggccattggcttggtaaaagttgaaaccttaagaaagcagggtggctcaacttcattagccagcaggaaatgcaaatgaaatctacagtaccacatcaataccatctgacatccatcaggatggctaaaataaaaaagactgacaatgctgtgtgttgtgagacggtggggcagctggtatgctcctagactgctggtgagagtgtaaatgggtagattcagtatctatgaaaaccattttcagtatctacgaaggctgaacctatgtaatatcctatagcctagcaattccgtttttatagtccagtggaaatgtgtacatttctgtactgaaagacatatgcatatagtagcattatttataatggtgaaaaatgcaaacaactcactaatgtttggtgtactgacaaaatgaaacacgcagtagcaataaagaagaatgagcttcaatacatacaatatggatgaatctaaaaaataaaatgttgatcaaagcatccagatacaaaagagtgcatgccatgatttcatttacataaagcttagaatcagagctctggtgttagaagtcagaatggtggttatatttcaggggagaaggtgcctgagatagaacataagtgggcttctagggtcctgcaatgttctaattttttaaattttattacctgactgtgttcactttgtgaaaatccactgcctttatgatttgtgtactttctgtgcatatattatatttcaatagagaattaagataaaaaaatataaggcccaggttggagtctaggattgtgacagggcagtgttgaaattgttgacaagtgcagctaggaaaaaaaggctgagttgtttaatgcatctccgattatattgggtaaagggagctgggggaaattagggacacaacgatggtgacaggagaaagagaatcaccacatggcggactgaacggggagcagcatcttgctgtgacaaagtccaccatgtacctgtcatgggaatgatgatacaatattacatcagctgcatggctatatctaatcctgtttcagaagacgtcagcaaaggccattcgcgtagtgcaacctgggaaggagttggttgtttaaggtggatacagagtagatcctgatagctcacttcttgaccttgtttaatttttgcctgttagttcagcactagaactctgtacaaaaaaatttaaggctgcaatatcattttaatcaaatcatatgcaatgaaaacaaagcttttgctagagttgtgagctcacatatggtttctcctggtttgtggtctcctagggagagaaatgcagcaggttgatgataatgtgaacagctaagttccctgggtggctttaaagggaaagggacaattcactcattttgtgtatttactaaaatcgccttctctctctcagtttctctctccttccctctctctctctcattttctctctccctccctctctcttacacacaagtgggcatgcacgcacgcacacacacacacacacatatacacaaaactagatttgggatccttgttttagtaatgactaatcactatctgggtatcttggttaaaatagaaaggccatttgtctcatgaatcaaaggttaaaaaatgttcttaaaggattaatttccaaaattgctttcaaatagcgtggctgaccagcttttagcagtcatcgttaatgagaatgatggaaaattaaggtcaggtttgcattttctttcttcttattacttccttctcttctaggttgatttgtattcttgcctttccttatatattgcttatcttcccacaaatttcatgaagataatttttaagtaagtttcatttctaatttttccttagttccagagattctgttgaatgtagtcgatgatatgttgttacaacacctctaatgaattataaatagtccattatatagcgcataccaaagagaccttctgattgaacatgcaagttggggccttttaagaacgaaagggggtgctatgaacaccagggcaatggctgtgaaccagcactacttgggcaaactgggatgtatgggtactctacccagaggcctctggggcaggagctggccttgtgaaggctctgtcctgttaggggagctgctttctggcctagccactctggactgagtaaattcacaggtgttcactcagctaggttttctctctgtgataaatcctgcaggggttctctaatttaggactttacagaggcactaattgaaaaaaaatgaaactaatgctaggaatgctcatgataaggcctaattacaaatgacatctgtggatactacatgaaaggttttggatatgatttaccagttctttcttactaagagtctggttaaaaactcatgaatgaatatcactcacagaatgacctcgattcacgtctggtctgatttttttttgtgtgtgcatgttgacttctcatgtgagctttgttcctgcagaccccacacttagtcttatatggtcttcgtcctactctgccttgttctggggtgtggctttcatatgttggggtcttatgaatagaagcagacaagcctcaatctcattaaacacaaggtttttgttggtttttctaaaggcaaggtaaggaagtccctatgacatggaccatggtgcgcatgctcctcgtggcttgtccctgggcctggctcatgaggtttcactcccactcaacccctgtctgcatcccgcctctctctgccttggtgctctggtcagttgactcactgttctgtcctgtgcactctgttcctagctgtgggagttattgggtattgaagaggcttaatgcctgcctcatctttctgtgggttctgaacccatggggaaataaagacgtggaagtcagaagaggatcaaaatgtcctctctgctaatggtaccccttgttctggtggcggtttccctgggctgcccaccattcccctctgtgctgaactcacctcttcagtcacaaacaaagcagcagcacctgccctggtggcttcaaacaaggaggacagaaaaacatctgtgctgtcaggctggtggccagagtggagggagagtggaaaaggggaggaagacaggtaagaagagaaaaaaaaaggcatagaaagcaggagaggagagaggaagacagacagggtgagggagagtggggttcaaacaagcagaacacagaggagagaaggagtgggacagcaagaaactgagagaggctgccagcaccatggctgggttatgggtgtgtaatgaaatatttgaaatattagtccattctcacactgctataaagacatacctgagacagggtattttattaagaaaagaggtttaattggctcatggttctgcgggctgtccaggcttctgcttctggggaggcctcaggaaacttacaatcatagtggaaggcaaggggaagcaggcacatcttcacttggatggagcaggaagaagagagagagaagggggagctggtacacactttcaacaaccaagtcttctgagaagtctatcacgagaactgcaagggggacatcccgcccccatgatgcaatcacattccaccaggcccctcctctaacactggggattacaattcaacatgagatttgggtggggacatagagccaaaccgtatcagaattttctcaaggatcaaataattccctcttctggccctcacggaaaatgaatgaatgctagagcaaaggaaagcactgctttctcaataccaacaggtgttgatggtaattcctgtttcatgcattaaagcaaaatgtggccagagggagaaaagggtccccctaacccccacatcctgccaacctccctgccccagaacacaggtcacgatattcccagtgaaacttaatatcgtgactgccagaatgttactattcagccatttcatgcacagtgccctaggggttgcaatggcattcctagacaactgcaatgcctttctaacattgttgctgaggaatgtgaagccacatcgttgttacctgtaaactgcagaacacaagccttctgtctgcaggaggagggtacgacttttcctattttaaataaagaaaacttatcgttgttattttataaaatgggtaagtttatgagcataatggagatctgttctttgaaatatttgcagcttggacaaaaccagggaattgtagagcatcaaaaacatttcaatgaatcacaataaatctccttctccataatgcttctttcatattcactgtctataagatctgaaaaagaacgctcagtaatgacgtacagaatgtgctttctctggagagggcagggcagaacaggacaggtcagggctggacaggacaggcagctatttcagtccaaggggaagcaggggatcatgttagagtctggggacttagccctggtgattcctccaaaagagtcataggagcacttgagctgtgtccttctgatgggctcagaaaaaattaatttagtattcagtgcttattcttcagattcaaatagtacagaagactataatgacaagcatactgagccagggcatcaggactcccactggaaggcccagagtagccaggtcccagcaggagggagaaacatgaaattgaactgtgagataggacaggagaaatttcagattagtatgactgggcagcttgtggaaactcatattctattaaggagtaggaaagatgacctagtttgggctattaggatgaaaaaaaagaaaagaaaatgttttttcaaagtttccatttggtgtataatttttttttttttttgatatggagtttcgctcttgttgtccacgctggagtgcaatggcgtgatctcagctcactgcaacctccacctcctcctgggttcaagtgattctcctgcctcagtctcctgagtagctgggattacaggcatgcaccaccatgcctggctaattttgtatttttagtagagatggggtttctacatgttggtcaggctggtctcgaactcctgactccaggtgatctgcccacctcgccctcccaaagtgctgagattacaggcatgagccaccatgcctggccgttgtagaaattttattgacaaaaaattcttcttgtaaattgctttttatctcccaacaacaacaaaaaaaaattggttctccaaagagactgtgtatccacccacccggaaggcatgttcaccaggacagagtgatctcaaagattaggatgagtggttggagcttggatttaattttctcctctcttggtctggtgtgacactcacttatttccctttttcaaaagttctagaatctgtttcatttaagagattaaaaaacaagtaactgataaaaaaattcagatattcatgcccttttaatctcttgacttgccaggtaaatctcctggttgaatttcatgtgcatgtttatttcatttgcatgaagtttaaattctcccagggctgtacngctgcaactatttttgcagattcttcactgcacaagttggctgggctgcagggggtgagtaagtgcagaacggcagccacacttggcttggccaagccatgcagtgtgatgtgagtctgtgccagcccagagggagggatatctttttctctttcacacaaagggctagtaagtggccttgattgccactaaggttcattgacatcatggctaccctgagatgtgcctggtacagtgcttcatgcacattgttatctggtaaatgcttttgatgatggtcctacatatatttcaattcagtgggaacattatatgtgttttacttagggagaacttcaccccaagtgccttatgcttgaaacaatagtggtgttttagcctttgaagacacttggtgtatgatctgactttcttcttctcttgatctttggggcagttatacttgagggtaaataggcctcaaattgcttggtgtcctacaaataaacataaagagcttagcttagatataaaaaccctgagaaatggggaaaaaaagcatgctatctgcacaaacaaggggaaaggcagtaggcaggaacaggatggaagtccatggaagatgctgtgattcctttcctgctcagctcctcaagtcctggttcttgttttgttgaagaacaagcagaaatagtgggatttgggatttagagttctggaaatggccagatttttttttttttttttttgagacagagtcttactctgtcacccaggctggagcataggggcatgatcttggctcactgcaacctctgcctcctgggttaaagcaattctcctgcctcagcctcccgagtagctgggattataggcatgtgccatcatgcacgaataatttttgtatttttagtagagatggggtttcaccatgttggccaggctggtctctaactcctgaactcaggtaacccacccgcctcagcctcccaaaatgctgagattacgggggtgagccaccacgcctggccgaaatggccagattcttagatggcctgaactatgtaagtctgttgtttgatttggttaatctgaggaatacaaagttcaagaaatgttgtaatctcagcgcccttggtacaagagtgcctgctctaagcctttgctgttcagggaaacttgataatttaggtgtgatatatttatctatctattgattcatccatccatctatttatctgtgctatttctttagtaccaaaaaaggcttgcttgcacaggttgggcaggtgttgtaaatgaatgatgcagagagagatttaaaaaaccgtaaggagtggtagggacttgacaaatagagtatttccctatttatagggagtggccactgtcaatcttgggattcttgtcttgcagaaaggcaaacatgcagctttaggggggtccatatcttctgacatttcaaaaggagctggaaatcaagatgtgaaatcagattatttaatattgacaattaattcaaatgtttgtgctaacattgcaagacttctcctcatgttgttgcatgccaagatggagaaaatatgttgggcacgttaggtatttatgtgtcagtttgtgacctctgctctggtatataagtttgcccttagaaatatgttcctgtattattttaaagttgagtgggaagcttctctacttttaatgagttttaaaggagagatgtcatctacttatccctctatcatttggaggataggctagttatgtcacttggattatacaaataaacattgttgtgggttatttaaaaaaaatttattttctgaagcgagtctatcaaggtttttaaaatgtggttcttcatggacttccaaggaggtttaggattggcagtgaaaagaaagagaagaatgggaaggacacttacatttctgcttcttgggatagaggtaatctgtatattttggttttaaaaacagatatttaatcttttaggcacattaatctacatttctaagaagaaataggaaacttcttgatagaaatgccacctgttttaacgactaagcaccaatggcactctgccaagttgaaaacaaatctaggtaaatttaaattgggctggcatttcacagaactggtgcaagcatggttcataaagtttatttttttgcttgagaaaaaaatgacattttactgattctgtgtaagaaaacctttaagtttttatcaaagactattaagatcagaattcaatattttatgatagtatttaatattttacaatgtattaatttacaattaaataagttatttaatacaaataacttaatattttacaatagagttgattatttttctaatgctttcctaaagaaattctgtaaagatccacataattgctagaccagtgataaagcatgtaatttcccctatcttcaatttttccttactgtctaccctctaaagtagttgacaatgatcttctgatagatcctggcttgggtaatacattacactggcagagtaagaattcagaaaatagctcaacaggatccctcagtttggctggtctttctgaaaagacaagtgtgagcagcctgaggagaacctggaactcaggtattctctgtttcaaactcaggaaggcctgggtgaattcctggtagagctggtagaactagctttctattatgaatattgagaagtttgaccaattttatcaggcttctggagtgatatttgcatagttacaacttaatatcacttttctacttaacactcaccagtaacttccacctacttgggccagcccatgtagttcaaggtaaagatcttggattttattccacataaggtaaagatcttgagctacaagatcttgaactactgaagctcttgaattacacgggctggcctctgcctttctctccaacatcatctccagtgacactggccttctttctcttcttcaaatagactaagctctttctcacttcaagctctttgttgaacctgctagtccctgtttctatatggctctttctccagatcattggcttcttttcatttgggtctcaagtcaaatatgaccttcttagagaggtctcctctggtgatgccacttctcctatcacagtatcccatcactctgttttattttcttcatagcccttatttgaacttatcttacttattatttgcctctcattaaaatgtaagccttgtgaaagcagtaccttctctgttgtactttattgctatattttcagaatcaaggacagtatctggcatgaagtgagtgctcaaaagtatttgttagatggacgaattacaatttgcccacattcagtggctttacttgtaatctgtttgactcttgattggtatgtaattttattatatggaagggatggaaagaatagggttcgagggtagtgaggaaatagtaaaagatggtactgttggaattagctacatgatttgagcagcaaattccaagtacggccttaaaacagaaaaagaagcaaatatatactacttgaaagtcagactgtatgataatctaatggtagatatagttatataaatcatacacactcaaagctttacctctataattctgataagaatgggaaggctgatgacatttttgcagaccattaaataaatgtagtgaacttctagtttgctttgagcctatctgcatggctgataaatgcttttccaatagaaagaagggaaaacatgcattcaaggtgataagcaaccggtgataagcacagctagagacagtttttaaaccctgaaactctgtggttactcatataattgtttataagtggctcattgggaaccaaggtaaacagaattaatcttttaaacatcaaacagaaataaaataatatttctttttttttttttttcttgagatggagtcttgttcttcacccagggggctggagtgcagtggcatgatctcagctcactgcaactttcacttcccaggttcaagcgattcttctgcctcagcctcctgagtagctgggactacaaatgcctgccgccatacctggctaatttttgtatttttagtagagatggagttttgccatgttggcccaggctggtctcaaactcctgaccttaggtgatccacccacctcagtctcccaaagtgctgggattacaggcgtgagccactgtgcctagccagaaataaaataatatttcttatctgtaccctaagacatgttggacaggagatgtcccatgaagctgatgaaattttaactaatgcagtaaataatccattgagatttaatcctcatcaatcatcatccttattgttaccatgtggcagaaaaatgtgaaattctgttaaatgcttcatcttgatggaaaaatatgaaatccttgtaaataaagcttgaaattctcaggttcccaaaagatgactcatctgaccttctactcatctttttaagacatgaaacaaaagaaagcaaatgggtttctgtggccaaaagaatttcatcaacaccagtccatgggaacagatcagacatagggaaggtgggtctcatgacactttttggtttatttcacatctcttgagcagagctctcagtataatctcctcaacaagaatgtgtattgcatttctgtaggacataaattgccttctctcctcactattcccagcactgattacaagcttcagcagaaagcagagttttaaattcttgtggaattaataaatagataagagtaaaggtatttagggggagacaaggacatagcctgtaatttaggtgagcaaaatcagtaactgtgagtctgggctgtgacatggtcctggctcactattatttttttacaagttttaggatcttggcgttttatttgctttatcaattactgtggactaagatgtgcgactgtgatgtggattaaacaacaacaatttatttcttgctcatgctgtctgtccattgtgggtcagctgagtgctctgttcattcttgtcactcaggcatgggttgatggagcatccaccatctcaaacgttgttaattaccatgcttgggaagaaaggaaactctaaaggatgttaccccaggtggttaaataagctcatgtagaaatggaatgtgacacttcaactcaaaactcattgaacagaactcagtgtgcctggccccaccaaaaccatccacaagggagggcagaaagtctaattgtgaacagaactaatgatatttacttagtatttgtctgcttgatttttggcacagactgatttattagagtggagaaggtaagctgattatcaaagaatgtcttattttcctcatgtagttaccattgatttattgaatcatgatttcattctttaatatattttgcatcaatgattgattaattttcacagctacatcaagtaactaattattgatttactaatcaattattaaattctacaaattaaataatattacaaactaaattcaatccttgaatgtatccaacatttattgggaaccagtccatgggaacagatcagacatagggaaggtgggtctcatgtgcttgatcatctactatgtgcttgatcactatgctagatactacattgtatggctttgctgaattattgttaagtcttcactcacttagctgagctcagaaatgaatacatctcaatgcatgcagagaaggttcttattgaggcttactcactttgtagggtgttggtggcgtttgagattgtgttttcaaagtgcttagcactggcgatagtgatgttcataatgatgttgcaagttgactaggatttgatagttcatttcctaaaataatttttattcaactaataattcaagtaaacactgctcacttgatgattagtcgtggagtgaagactgcgttgtgaagctcaccattcattctctaacagtggtctcctgagttgggacacttacataggatttatttctgatgataacaagagcacagatgccaaccatgcatgtgatagtttctgggagaagacttgatgattcagcactgtccctataaaatgacaaaagaagacccacatatagcattaggtatggatgaaggtacttaaatttaagcttaattaggtgtaaatccttaactcctatattctactctctggtgctttgaagttggcctcttcggtctccagccacagaagggattttcttcgctgaccacagttccccacgttttcccttcagtaaatagcagatgtgtgtggtggtaagctggttttctgccattgctgtgtgaaaaggcagatattctgaatgaggattgtaagttatttttgtgttacacattcttctttagcttttttcaaaagcaattgcattttagttgaatgtgaaaatttactcttgatgattttctcagattaatgctgtcatcatgttaatggggtaatgcttccttctgcaaagatcttggaatttagggcttctggtcagtgttttacagctttgtctgagaaagaatgtaatatgagtatgtttttggtacatgacttcaaaaagccaagtctgctttgcctgatttttgtgtgagcaatcccacctgtctgatctcacccctgctcccaggtcacagatagaggagaccttgtgccctagcaacaaatcacatccactttagctctatggggacatttcaacaacaaggttcttgttgnggcttacccactttgtagggtattggcggtgttcgagattgtgttttcaaagtgcttagcactggcacagtgctgcaacttgcagcataattatgaaataccttaacaaaaggtatttacaaaagcatgagaggatgaatgtgaggaaggagcatgtcatgttgggtaagaaaatatggcactagaaacatgggagaaggngtgtgttttgtgggggtagatggataagaaagagaacagntggatcagacaccaatttaccaaatgattccataatattagtgcacagataatgcacagatagtgtgcaacaacagctttgggaaaggcaaactgactgtctataaaggtcagaagacattttataagatgtgttttactgaaagtgttgtccttgtgaagaggttttgagcaaatattttaagaagtctttagggaacaagcaattttcctttttgttgccctttctaagaataagacataaataggaagttccatccttttatttgttctattcaaatatttataggggaaaatcggctactacttctttataagacccacctttgaaactcattatttttccaaggtgccttgttcttataacaatattttcttctatgtttgtttatttatttattttattgagatggggtctcactctgacacctaggctggagtgcagtggtgcgatcccagctcactgtagcctctacctccggggctcaagtgatcctcccacctcagcttcctgagtagctgggatcacaggcttgtgccaccatgcccggccaattttttgtgtttttggtggagatggggttttgtcatgttgcccaggctggtctcgaactcctgaactctagcaatcagccctccttggcctctcaaagtgctgggantacaggcgtgagccacagtgccctgcctataacaatataacaatattctgtttaggctatggaagaccacatatattcttacttaagcacttagaatggaagccacctgaagacagaggttatatcttcacccttgtcacccacacataataagtgcccaattgatgtcttttgattaattaaatgaattaattagtgaatgaagacagacctaggactcctgatagaaaaagaataaaaacttgcttctgtttgtccttctacagtgaaaagatttcctaaatatcacatataataccagcacacatatcttgtttgctagtgatttgatttcatttatgtctgttatttaaattcagggaaaaacataggtagttttttcttgtaatatctcaacactgaacttgaatgaaaccttattaaataatgcgcaaaattaactattatattttgctgctaaggggctttggcattttgctttggtaaattatgtcgctggtctggaagactcaggccctgggatgacaggcctatgtcacaatgggtgacatgggttgggaaagatggctggctgtcctgtaaagtgccttatgagtgtgaagccaaaggcagtgcttggtaccacccagggaatatctatcagaatgagatattttattggcttcacataccataccataacatgtctgatacagtcagccaaaacaagattatttatcaatgcctctgccagctacccaagatggttaagagaaccaaaagccaaatgcagtgatcaaaaagactgctgaagaagtaaaaggcaaaaggatgaagaaaaaccagccaggaacccatgttttgcttctatctcattccctgggaatcagcagtgtatgagcatctatctctatataatccgtcttctctgcaggcagaagggctactcccttactgcacctgagtcctcacattctcaaccacatcagtcactaggaagcggtcaagggaacaccacagtatagcagagtggtcaaatctgcaggctctgttgccagactgcctgggttccccttccttttctatcacttattaccttgatagttactaaaccctcagtgccacagggttttgatctataaaatagagaaagtaataaaaatgttatctcatagggttgtagtgaagattaaatgagatactgtgtacttactatgtattgtatggcttttgttaataaaggcagggtcaggacaactgcatatatgtggtaagtggagatgtgaaatatgtataactggccacctaagttcagtatttgaggatgtatgagaaacgctagttgaataaaaacatattattattacttgtgttgttaccattactactgatgttattaccaagcagatgttaaaaatatttctatatgcactatggatcctacttcacttatgaggagaataatataacccaaagcttttaattctcattgcttcagtctttcaaatgtttttgttctcaactttactgagaggtagcagaagccaaaagatagaaatctagtaaaaattccaagtagaaagacataaaagtttagtctttgaaatgcagttggtctggcataaaaaataaaaatcaggctctagtcccaggataagataattttttaatgagttgaaattgtagctaatagaaagttgaatatacagataaatgaattgaaagaaggcatggcatggtttattcataacagatgttaaaagagtaagagtgattttttttttacaaagacaactcagaaaataagccagagagtttaaaagtgaattcactgcacagcttggttctgcattcataaatacaatgaagctcaaaaaattatttagtagcagaggcttatgagaagagcttggttctgtggagcagcaacatgataaagttagatttttggggcctcacctaacctgtgggacagctctcgggcctctgatttcaattattccctgcttttttttttttggtattgctgcaacacatctgtctcctggtaccctctccttgccctttctgtctgctttccactgggattgaaatgcttttctttcctccacctctgtttctagttgcagtatttttctttatcaagctcattttttccctaacctgtaaaaacatcaccagtgaatttatgacattggagctagtagctgtgttgatggacgtgagtgtccagttccatagctgcatgccagatgaatagcagtaatagagctacagaggccctgccagcacagccagacatgatgcactaacatgccagtttccttgcttctggtgcttccaagccatggggcccctggtgatatataccgttaatcaaacaagtgtgatgaaagctaaatgaagcaaatttagtgtgtggcatcaatatcaacatcatttatttactcactcattttggttcacttgaatattcagtactatttttccaatagtaaatgatgagaaaataactttttaaagtggggggaaaagaaggaaaactagtaaatttctcaaaagaaataaattagaagaaggttgaagccatgtcaaatggcttcaattcagacatttttaatcataggtagatattggtgtagccagagaaaaacacagtattcataaaaattatcattcagatgtgaatatgctgatagtaatattactatctggatttctccagattcataaattatataaaaataacaactgcagcccaaggcagtctatttaaatgcgtgaggagtaaggcaaatggtattcggagaaaagcattgacaacttggttaggtaaaatgctacattttcatcttgataataaaatgttcaaggtaattattggggctgttcaataagcagagccagtgagaacataataatcactctgttttgtcagtgagaacactgttaatattaatgggaatgtaatgctgaagttcctggggattgataaaagggcagctctagatntgtgagactgacacgcggctctgggggttcctgaccagttaattatggaccccctgcagtttttttcactctcttgggagcattcccaggacccctcctgaggcatttcttactaaatgtgagagagaacttattttcaaattcctctgaattgagaaccagactagatgtagggataaagtgaagtacagttgatctttgancagcacaagtctggaatgtgtgggtctgcttatacttggattttcttctggctctgctacccctgagacagtaagaccaaccccttctcttcttcttcctcctgagcctactcaatgcaaagatgatgaggatgaagaccttttgaatgatatggttccacttaatatatagtaaatatattttcttttccttatgattttcttaataacattttctttcctctagcttactttattgtaagaatacagtatataatatatatataatatacaaaatacgtgttaattggctgtttatagtattgctcaacagtagcctattagtagttaagttttttgggagtcaaaagttatactcaaatttttgactacacgtgggttaatgcccccaacccccaccttgttcaagggtcagctgtagtagattaaaaggtttttcatgtctggaaagattctctattcctggactggttcaaggaacttagaggtcaatctgaattccaaggagtgaaggtactaatggtttgatatccaggtgtacatggccctctgccaggagactgtagggaaagtagattatcatcatccaacttgtccagttgtgcagccagatattcttgctgacaatgtgaatatttacctatgaatactagagtactagtctaatgtgcaacaagatacatttgcaaagtgcagggaaagtataatagtcaggtgaccaaaggtcacagtgaccttccttaggtttggtctcctgactattacaccttgacttgtttttactttttacaggatttttacagtgcagtagtggcacataatttcttgatcttgtgtgtttctgttacggtaaaaataaaaacaaatataaacagtaacaaagaaacagcttccaggaaacttattagttattcctcctatgttacatggcatttccataattctcatctgtattaagtttgctgtgggaatggcaatcatagtatatagcccttaccaccagcactgccttctcacatgatttattgcaaattggttatattggagagtggattctgccaaatgggtagcctaattagtagtcaaattgttgttttctctagtgatttattatcaagcgtattaatttcagtgtccaacagaatgaaataaatgtcttggactattttttcaatgacattaaaaaatgaaaactaacccagagaccaattacattgaaaaaaatttatttgagccagaaaaacgtccnagtactgggcaacatcccagactaaaaatggttcagaatgccccaacctccaattgtggtgacttagatttataaccagaaaacaggaaataacatatagagattaccttgttggtgcaattcaatgtttgccttatgtgggcataatttggcagctttcagcctgggaattgactgaggatttggctgctatgattggcggagaaacagttgcttggtaacaagggtatactcctagattacagcttgctatgtatggagactgctttgagccaaactttactaccaagtaaagaatctgctgtgtgccaaacttaactttaacacatctcagcattggtctgaaaatcagttcacagtatttgatagtgtgccttgccattttctgttacacactttgttccctgtatgaacttctgtttactttgcactatttctgtatctgctactttggaataaaagtagtcagtataacttaaataatgtttcttaaatagtcaaatgagagtgatgattcaaatatacctcctttcccccattttctttctaaattattcacctctaaggtaattataactaagtttcaaggtttgatttggaacatttttcatatttctgtcacttagttcatagatgttcatatttctactgtattatcttatcagttattaagattcttgggagagtatatatctttttataaagctttccagaatagttaccatgatgttcattcttataagtaagcattcatgcagtagctgcttaaatatgatcccgtgaatggtggtataaaaaacatagtggattagacactatgtgctctaggagatggaaattgaagaccctggcccagtgaatttctcagcaaatgttattggccgcctggtcaatatatagtgttgtatgcatataaagtatttggcacatacttattaatatattaatatgacacattaaaagtaaactattctgtgatatatgttatggattatctctcaacatccattccaatttcttactagtgtacccctggccctgtgaaagctggaaccatctcttagtcttccctggagataaggtactgaatccatgaaagtgctagtctgttgggggaattctgctcaccagaacccttgtgaagcatcctttagttgacatgagttcagaggtactgatttatgagatttagtaggtggaaggaaagcagagactaacttctgctatttcatctaccatgcagagggttatggggatatcttgttgctttgctttcagcactggcacaagtccagggcccatttgctagcagtgtgggtgttaagaggcaggatgtaaggtatcacctgtgctggtgaggaacacagtgaggagtgtatgatttgggagctgagagcagtagcagtggggtcagcagcttcctgattgggtggtcccaggatcaaagtggttagtgatccgctggcttccttgctggtgtttgctttctaactgtggcaaagcactgtggttatggaactggcagtgacccaaggtggcaggtagcttcctgatcccagaagaggcagcagttcctccagcagcccatttctgtggtgttgcttgggaactatttctgaaggctcaacttagatgtattcagccctccccagtgattctctaagccatttaattatatgtcttaaatgtttttcttcttaaaatagctacagtagattctgttatctttagttgagccataatcaatatcccattggaacacatgcttcctacatattgtttcaatgtcaagtcattgagcattatgttatttcatgganatttgtgggagtaccactagaaataatcacaaatataattataattgtgtctttttcaaatccatcacagaatatttacacgtactccatattttccctctaatcaatgagttacactggtgatatccccaggcccattaattttccttataaaatatcccttgaactgtactttgaagcccaacaaaattgagttgtttgagctataaaagcaagagcaggcagaaatgcagaatctccacaggaaatgttttgccttcagggtcctgtcattcaaactagagattgaaaataccaatattctagctaatgtctaaggctgcttatttctatggctgaaggcacagggccaattagaggccaaagcagtgggtcctatcaccaggtaagccatttagttttactctcttttgtggcctcagctttcgctcttggtcttacctcatcatactacctgcttttgagcagagagaaagtgtagaaaagtggcagaaaatactttctcaaaattctttagtaatgatgggtcaggagcatcatcttctagaaggactgtgcatcctagtcagtctccagagagaagagagaaatgcaaactgtccagtaactgtgagccatgctaagctgaatagacaggcaaaaaggaggctcactactgtgccttgggaggaaatttgtattatcagggagaatggtatgtattggttaaggtggaggtgtgatngaaacattttgagtatataggagaatttagttcacaataggagtttaaaaagataaaaaaggccaagtactgtggctcatacctgtaatcccagcactttggaaggccaaagcggagggttgacttgaggccaggagtttgaaaccaacctggacaacacagagagaccacatgtctacagaaaaaaaaaaaaaagccgggtgtggtggtggcacgcctgtagtcctagctactcaggaggctgaggtgggaggatcgcttgaccccaagagttcaaggctgtagtgagctgtgatcatgccactgcactctagcctgggtgatggaatgagaccctgtctctaaaaataaataaataaataaataaataaataaataaataaataaataaaataattaggtggaagaaagatgacccagcaaagtgagagactattcattgcttcataattatattcagctataataatactgattcctttccaaatagtgaattaaatacagacatacgtgtttattatgttaaaagaagtctgaaagtaggcagtttggggctggcatggcaattctgcaaggtcatcatggacccaatttccttcttgttctgttatccattttctaagcacatggctcacattctcaagatcaactcatgatccaagatagctgctaaagaactagatatcatctctgatttccagccagcagaaaagggagaagtactctccttccccagaggcccatgcaatatttcctcttacatctctttggccagaattttgtcacatggcctcactaagctgcaagggagcctgtaaatttaggctatttggccaagcagaaatatacctagcaaaaaaatgggattctgttatgaaaggagaagaagatgagtggatatttagtgggcaactctaatctctgccataaagtaggtgatctctgtcataagactgagctagacggggattatactatgctgttgttgactgtggccttttggctctgtgctgaggctttcttttctagggccacaaacggagtttctcacatttacttctggatgatccaggaaactaaactggttttcagagaatactgccaaaaatgcctgagcacatgctcagctctgtgagatcagcaacggcacctgagacctttttatctgcttgttgtagtttttaatccactgaaacaatagcaggtgtaagctggaattctttggcacacagcctctgaaccttggctcatgttctcagataaatgcctatagcagctgaagctcttgaaaaaaatttaagaggaggaaacagagtagggatctttttggggtcacagtctaggtgtttttagagccactcaaactcgaatcaagaccctttgattaccataaaaaatctaaaataagatgttttgtttggcccaaacagttttagaaaaaagtgagccaaatctgaaaattagtttatttcatatatattgaatagttaggccatttggccacacctgtcctgcatcctgcgtgttgacaacatcctgggactgagcaatagttgtcatccttaggtggggcctgcatttgctggcccccaaccatcgacgcatttctgatatcttgtgtttggcctacttttcactcattgaatgtaacctgctgaatacctgtaagcatctaggctgtgaccctttctgtggatggctcaggaggtaaccagtgcatgagaagtttctggcctacctcagttgctatcagggtgggcagagtatgtggagaactcctagcctggagagatgagaaaggatgtaggttaaagttgaggtcctagaagaaaagatcttgacaaggaaagcctgaaggcttgtccagtatgaggttgccaggagtcatctgtgggaagacacggaagtgcacctaggagcagctggtgtctcaagactgactgataggctcgaacctgagccatggtttacaaagctgacaccaggatgtaactatgggttgtagccaagttgttccaacacaggtggagtgaactcctgtggtattttgaagtgataattggctagggtaatattttcagggtgctggttctaacagatggtgctatttgaaatccttccctataatctccatgaatgactctgtaacctacttaggaggcttattcaagtggttcaaaacctaggcctgtattccaactggttggcaatctgttcattgatgttgttatctgaattcatgaagtgggcattacattgttttaaacaagaagtatacacaattgcttcccaatccactctcctctcaaaacatgtactgatacatgcatgtatatttttgccacccttaaaaattcactttgtaattactttaatgttaatgtagaaaagagacacgaaaacctcaaaaagatttaggatttaggatttacttacctgctatataaaaaaaatcagggtctatcagctctgttggaaagaatggcttgagaaaactctgctttcatcatttgaaacttttattttgggattgtgtttataaatttcagaaagagtcctcttaccttcttccagcccaagtaagtgattggattgacgtttgtattcatggactttggcttgaaatgaaatcttttaattctgccttagatagtaaatgccaacagtttaaagtggcatgattcgatctttaaatttgccctactgatgaatggtgcaaataggaaaaaggaaaataaaaagtatttgctaccttgagaaatacactcagtctctatttgattttccttagatgtgggggtctgtaattgtaagatctgtttttattcatcgtaactaggaaagcctcaacattttaattaacaatagtaatataaattacattagttttatttcagttagaatttttttctttcatgtatttaatacgaaaatatccatgcaagagttccttcagcttaagtcagatgtgttcagtggctggggcagtgcattaactatagtctgcatgtgagaaaaacagcaattggcttttcactagtatttgtcattgctctatcctaatgcattcaacattttcctattgtgctatgctccactgtatatcacattttacctatttgattccaaatttactttgtggtattaggttttaatttagtaatttacatacagcttggaaaagtgattccttgaagatattgctttgtatctacatgataattgacactatttgtattaatattaaaagcattaacctctttttcctagtggtccccaatttcattcttagcaaaataaaattacagattctgttttcaaagaaaatttgtatatgggatttctttccattccttatctaatgttaggatactgaagttaaagtatgcattttctgtttttatatattttgtctttaaaatatatgttcagttataaaagtaatatcaattccttaaataatttttgtaatatacaggcaagccgcaaaaaaagaacaaatattctagagttccatgaaagtcatcatattaaaaatgaaattttaagcagttggacttcacattatttcataagaattttcaactctaatgtatatataatgattctaccaagtgtgtcatagttcacttagctgtttcaaatatttttttctactaagactaattaatactgtgtggaatacttttatatatagaccatttccatacttgagttttttttaaaatttgagttctcagaggtagatttactggttcaagagacattttttaaacttaatattagtttgcagggagcaatccataaatccatgtttcctaatactctgcctggatttttttttctgtgtttggagcatcagatgagaagttgtgaggagaaacaatggaaaaagaagaaggaatcatagaatcattgctgagtgttgctccccaggttcttgtttgctaactgaaaggaatttgctggctgaagggaagacatgttgaacacttttattcaccctatattcaccctgaattctctccccatggccaagggacagtatcaagacttctgttgtttcactgagacaagtcaaattaagaaacacttgagtgtttattgtgtcctttgtagggcttatgggcatatacctcagcaaagtaggcgggcaataatttaggtcatgcccatttaatttcaaaggccagctttaatcttttgggctgattgtgattactccaaaaacggcagaaaacaactgagaagggaataccaggtccaggttacagttctatggaggttttgtgtaatcctgagttttcgctttgcaatttggcaccatgatagcttttgtattttctttcctctgttctactttttcccatcatggcaggtgaacttctcagtgtgcaaggaattatatgtagctgactcttccagggtatgagaggtgggctgaagctatcgggatagcagctggcttcagtagtgcttttagctgtctagacttgtgctttctcattgattttggtgtctgggcatgtcctttactttctaaatcatgtctgcatttaaatattttagaatattttatccagcattttttgttgtttttccccaaaactagtattttcaatatttctgtgagagaacagggagtcctttctagtatattgctggaaataaaatatgcaacctattctctacacaacagtcagggtgatcttttaaagtatactttagatcatgtcagtcccctacttaagaccttccacagcttttcattgctcttagattaaaagcaaaaccctttatgttttctacaaatgtctgcatgatctggctcctaagaatcttctttcttacccactctttctcctgctccttaacttccagccacactggccctctctgttttttgaactaatggagctcattcctgcttggggcctttgcacttgacattctttctgcccatgtcctggacacactggctcttatgcatcattcagttcacagcttaagtgtcctcctcagaaggacctaccctgtccaccctactgaaaatagcaaatttgctatcacccaatcattctaacccatcaccctgtttaattgtctgccttaaattgttttgtttgtctatttgttcacatgtttacaattcagaatataagctctgtaggagcaggaaactcttctctctagttcatcacttcaagcccattactaagaacaatgcattgtttgtggaatgaattaatgatttaaataattagcctatatagtgtcatttccaaagttggcagaatatcatcattggaattttgttcttaaggggaactgggttatagaaatgtgggaagaatacttaattagcattgaaaaacaatgctttactaaggaatcaaaatcatgaaatgtaagagcaaataggagtgtttatcccctttattccagactctattttatagatataaaaaccgagactctgggttgctgtgagtggctcagaccccacaattagtggcagagctgaggccaggggatgcacattctgattcctgcatcatggctgttgcttaatatctcaccatgagtcatggctactgcccagtagattgggcacaaccatgaatattagactggcaatttgctagagattttgcaaaaccatgggaaatggattgaacaaattttcctgtcatttttgtaagaggcagtaaataatggtaatttgagtattagagaacagcatctgaatactttttctaaaattctacaaggtgaacatagaaaattgtagctttcctttctgcctattgctttctgaatgtcaacagattgctttcttcagcttatgttagaatgtcaccagcaggacccacatctgacatgctctggactgtcagagccactcagcactaggagaactttccagttgaatttctcttaagaaggtcagtaggaataagataaacgaaaaacttattcatcattaccataatccttgtgaaagtggaaaagttcatcctggcaaattcaaaatcgattacaaactcatgcatgttgcatatgtatttttaaagatttttacaaacccaaataaaataagtagaagaaaacagtagtgataaatttaaagttcttaactgaatgagtagctttgaattttactcaacggatataagctttggttttttttataaaaaagaaaacaggtttgttaagagactatgaacatattttagaaatgcttcagtgattttatcatttaaatagaaatttggattattctggaaaacagtttgataatatgtttcaggcatttgaacatatttactctcctggcccagtaattgcagttttagaaatttatcctattttaggaatctagcctagagaaaaatctgaaattcagtcatcttggcataaggatggttgcagaaatactattaataataaaaagttgaatagtacctaatattcaagtagaggtataaataatttgtggcaggttcatttgctatagttttatgcaactatttaacaaatataagtaagattatttaaatgatgaaggaaaactctttcaatataatgttaattttttttttttttttggagagggaagagctcttttatttagtaattcctgacacattttagatgctcatcaaatagttaattttcttttcattgcttcttacttttctctccctttatttatttatttatttatttattattatactttacgttctagggtacatgtgcacaacatgcaggtttgttacatatgtatacatgtgccatgttggtgtgctgcacccattaactcgtcatttacattaggtatatctcctaatgttttccctctcccccttcccccaccccacgacaggccccagtgtgtgatgttccccttcctgtgtccaagtgttctcattgttcaattcccacctatgagtgagaatatgtggtgtttggttttttgttcttgcgatagtttgctgagaatgatggtttccagcttcatccatgtccctagaaaggacatgaactcacccttttttataatataatgttaattttttagagagtaagacctaaaactatatatacgtgtatgtaatacgtatatagtataatctcaactacataaaaaaagacaaaaaattaaaagattgcaaaaaaagtcaaagtattaataaatattatctctaggatttgaataattattgctattttctcctttatactcttcgtattttcactttttccacaatatgtctattattttaataatcagaaaatcaatataatttattttaaatcttggcagatgaacatagtgaatgaactatgtcaaaatgcggttggaattttgttgaacttctttacagaagactatatagatgagtgtttttctaaaaaatctttggatagataataagatcaattaaaattgagtaaattcatctgtttgcgtgtgtgtgtttaaactatttatctcttgtgtgctacttagctcctgtattgctttcgtaataagactgaggtagttggtgaaaatttgaacaattcttgcataaagattttattgcataggttataggataaaatgcaagagaaatgttttgtggaaagagtacttagtagagaatcagaaaggctttatgggtccttcattttggtcactgttatacctttgtctaatagaccattgatataactttctactctataagagattgatacctagttaaggaaggtcatgatatattcactttgttacaggaaatttaaggtgcccagaaaaaaaaaatcaagaaccaaaactaacgaatagagagctctattgttattgactgaagtataaacttagatcccttagcaaagcgaaactcacagtccatacaaaaccccttgctatgtccgttggagaaggattggcagcaagatagcaagtatgtggaggatcattgttcatgaagcaggggtagataggagccttttcatatacttctaaccttttttattgtctaacctattgttatgttgtctcattaagaagaggcaatataatgtagtggccaagaggtatgacttaagaatcactggactcaaaatttgccagtttataactctgtaatcctggacaaactactcccaattttctaatttggaaaatgtggatgataatggtccaaaaaaaaaaaaaagatgagtcatcttaagtatttgaaccagagagaatttaattggctatgcagctgagggaagagctgaaaagccaaatggggtcattaaacaacccgaatattagcaatagcaggaagcatccactaattctaatttgaagggacaatatgttggagacagtgttactgggtccacagactgaggtcactggaattatggtgtaactggaggaggcatgggagaaagctttttgatggtagagattctgctcaaggcacngagagaggagagaaatatcttggtgttcccatctttcgaccctccagtcttgtagccaaacacagccagaagtcaactgacaagggactctgcattgcctctctttaatacagagcagagaaggagaaaggtgaagaatggatgtgtgacaggcaacaattcctacctcagaggtattatgcctaaagcatttagaacagtgcctggaagatatgtgcttaatagacactaccattatcatcgtcatcatcatcatcattgttatcatcattggtgccatttgcagagtagcaacatctctttgtgaatgtactttacaggttggatgctatgagattgtttctaattacagcccttttccgggccctgctgtggtcaggttgctagtcatttcagcatttttagtgtttggtgaggcaggggtgttccaccttccattctcatctaccctgcgttgattacatttagagtcagcagacctagttcattgatgacaagaactgagccacgcaatgttctaaagaatccaggcagttttaggagcatgataaaaattcacaaccctgtgggaaatgacccttggaagttaactttaaaattaatgattttaaaattaggatttccttacatatcctagtccctttagagttgagcttagctttgtcctgcaaaactgaaagaatacatatttaatttttttggtattttctgtagcatggcattaaaattaataaatttaaaggaatagaagcttgacaagatgccttaataggcccaccaggaataatcacatagttgcctattttgaagcatagacataaaattaaaaaattccatccagataagtcacgaggctttgccaaagtgccctcttaaattgctccccttttgagaatgcactatttattgtagcattttgctgagcccttgggaatttctcttctgagagacttttaccagtatgaaaaatagcagcttttctaagttttggaatattgtcagtcttttttttttcattggttttccgattatcctattctcagaaataacatttattgatctcaaggagttaaacattgtcttgttttctctggttctgtattcttcacctttaagaccagatcccaactaagtaataataaaagataataatggctaagagtttttgagctttcctccacgtcagttattgttcccagcactttggtttcattctctcatttgatgtgatataggaacttgtaacaaccctatgagacaggtgcttcactttaaagactaagatactgacgcagaggttataaacctcccccacggtcacaaaatcatgctgctggactgagctcgcaccttccactactattaatacatggtaatgttgacatcttattgtaaatgttaaacaataaagcgtaaagggaaagaagtaaatgcaaaaaaatggtcaaagcaggagatgattttaaagagcatctggttcagtctccccttttacagctgagaaaaccaatctctagaaaaaagaaatgagccttttgattataaagcagactgcctaacaagtatcaagtcatctcacttattcttctctgtcttccatgatcacagagttctgaccatgtcctgtgtcactctcaagcagagattgaaaatgacattcgtcctttacttgttccaaggaagcaaacattttatagtttgaaactgtttctcttgcatttgctttgcaagaggtttgcagaagttaagcctcatggagtcttctctccttaacttaagtgagtggattgcttattgctcttctttgcctgtaaattcatgttgattagacagtggtggggtggagggctgatgggtctgtgtttggttggcaagctaactccagcatcctataattactacattttcaatctggtgcatagttctgagttttgtacatccttatgtggctctacactctttgaggttaattttggccttggatggtgcccttttaaaggcagggtaatagcaacacagtgtttttgcttgggaaacgctctgtgtatgggcttcttctcttggttttaagtattaacaaggtagtaagtatgaaaggtgctgtgtttggagtctttaaatggacttggcatttggcttgtctacaatctttcaggaattttaatcctgatattcagatttgagtcacacacctggggagtggtgaccatagctcttccttacccctccagctccacttctgggttagcatgaactgaccactgtaacctgctctcaggctctacacaaaggtgcttcagaatctgcctgtggccacttctgtgaaagggcatggtcacagtcaccgtggcatggatagaaaactggagagcagcaggaggagcccagggatagagagaggaggcctggatgcctgcctgggctctgtgccatgccttgggtaggccacttgactactttaaaccaagttgactctcctgtaatgcaataggggtttaatgatctctgtggctctagagttttgtagtttctactgttctttgaagcatgaacattaattcaacagaagaaaaaaaaaccaaacatttttcattcagaacagtttcaagatattgctctgactcactggatggcaaatcatagtgaaagggaagtctgactcgacttccattttgcattacttttggccagcatggctctttatggtgtacttgttgtataataaaacagctntctagagaatactcttacatttacttactgagagataacagaagttccgaataaaaactcatagaaatggaagactnggaaattatttttttcttttttctattacatacagaggaacaaaggctgatatttgtgtttatgcccctttctgaggacaatgtccttgaaaatccatattattattatttgtctttatatgtaattggattgtttaaactcttctctgaactttgtagctttttcattatatctcttttgctggaatattaataaaactccacttaaatagccactttattctgtaaattttatttaaggcctgaacttggccgcaaatgagagtacttgtggtttttttttttttttttttaaatgatgtgactgctttgtgaagggacataatgagtctgtgttctcttctattcctcttcaacaactttgtcaggaaagaaggctattatgatttcttggagatgtgggaggattgtggcatcaccatgtcctagtcatggatgaaagnagaaactattataccagggtaacatctgaggcctgagataaaattcccattacaatctctttaaatatttctgtgtttaaatgggatgagaagactatccactccacaaangtaatcccttttcttcctcagcctagtgaaacttattgtttcttttccctagataaaaaaaaaaaaaataggatgctgtacagnttcttttggcttgttaaaagacagataattcacagattttgcttttctgtagcttatgcaatgtctgaaaaggcgctgtaagcagggattccctgaacatngcgccgtgggcccggatccctgttttgctttcttcagagagctcactggcagcctccctgatgctttgtgccagtttttaggcgctccaaagccacatgcacattgacataatctccggtggttttggctggtttataatctggcttattgaggtttggttcaaggcagaggcctttagggcagggatcttctgtgagctgaaataaaagggtctggtttggaggagatttgactctgccaaataaaagcggcacatttccaactgcacatgctgagttgcctcggaacacatccatgcagaacacagacatgcattaggcagctagtttgtggaaggcagtgtgctgagcacaagggggaatagaaagacacatggctgccgtgaaataactgcttccagaaagcacatgtcgagttggaaggatgagccagaagacacacagagaatattactcagcctaaaatgtgacgtcccgaaagcgtgctagtatgagacccacagagttggagaagagattttctttccagtggggaaaatccaggttagaaagaccagacaggccatattaccggaggcaccctttatttcaagtttggctttttgtggtttcggttacctgcagtcaaccgtgtccnaaaatattgagtggaacatttaagagatacacaattcgtaagttttaatttgcattctgttctgagtagtgtgatgaaatttcatgccatcctgcctggggtgtgtagcatccctttgtccagcatgtccatgctgtccatgtgactcgcctggaggtcccttagtagccgtctcattagcagatccaccttcgaggtatggaagtgcttgtgttcaaggaactcttagtttacttaataatggcccaaagtgcaggagtggggatgctggcaatttgaatatccctaaagtgcttcctttaagctaaaaggtgaaagtttgaacctaataaggaaaaaaacaaaaattatatgctgaggttgccaaggtttatgctaaaaatgaatcttctatccatgaagatgtgaagagggaaaaagaaattcatgccagttttgctgttgcaccttgatctgcaaaggttatggccacagtgtgcaataagtgcttagctaagataaaaaaggcattgaatttgtgggcggaagacataaacagaaatgtgttctgattgaccgcaattaggtttggtactatcagtgcagtttcaggcctacactgggggtcctggaacatatgccctgcagataatgggggactgtcgtatagagcccctggatactaatggtgctagggattcaggcccctctcctattttgggaaggggcaacctcagcatataatttttgttctttccttattaggttcaaactttcaccttttagcttaaaggaagcactttagggatattcaaattgccagcatccccactcctgcactttgggccattattaagtaaactaagagttccttgaacacaagcacttccatacctcgaaggtggatctgccaaagagacggctactaagggacctccgggcgagtcacatggacatgtcgtgtgtatggaaccttggaaagaggctgtccttacctccctgtgcattctggcagcccctggcactgctcatagatagccatgtgactcaggctgggactctgactctagagcgaatgggttaaaggtcaagaggctgttagaacttattgttggtgtcagtggtggcgcccattggctttcagtggcggcggcagcagcagtgtcctggctgtaattcttgctacaggatagtggtcgtgattcttgctccttggcatcttgcgcgcctgggtttttgctcattttctgtccttagtgatgaagacttctactgagtctgaacctgcatgtccttccaatggagtctacttttttctcctccagctagccaaggccggtttctgttatggcaagcaagaattcccacagcacctgagtgtcaacggctttcatcgtttgtgctgacccacctgtgcagctgatcgtctgccttttttctccggctactcaccttcctttatctacctatataactccctgctttgaaggctgaactccagcatttttaacttttcctgagttattgaagagactttactgtttactattcctctgtacagtacaacatcttataattgcccattatacagattttttttacattgtatgtctttttttttattattatttgtttctgtttgcctactagcccatgaggaatgttttttggtaggaactctattttcatctttatagttccagatccagctaagattacactctggttgcgtgactgaacaaatctgtttgcagggagagatgtggtgttggaattgtgaacctatggagaatgaaaaaaatagaatagctgttgtgaggcatttactctggtgatactaagggaggaataaaatggtgtctgaaatgtgtgagggccgtctgataccgagtagtgtacatttattttccacttaaaaaagtctggtttatttaggtattatttatttacagtaaaatccatcccttttattgtagagttctataagttttgacagatgcatatagtcatgtgtataccaccagaattaatgtatagaacagtttgatcacctcccctcaaaagctctccctccttcttatagccagtgtctccccacatcttcagctcctggaaacaactgatctatgaattgatatgtgtgtntgtgtgtgtgtgtgtgtgtatatatatatatatatatatatatatatatatatatagtttgtttgtttgttttttgagacaaagtctctctctgttgcccaggcttgagtgcagcagcacaatctcagcttactacaacctctaccccccgggttcaagtgattctcctgcctcagcctcccaagtagctacgattataggtgcctgccaccatgcccagctaaattttttttttttttttttgtattttcagtagagacagggttcaccatgtcngccaggctggtctcaaactcctgacctcaggtgatccaccggccttggcatcccaaagtgctgagattacaagcataagccaccacatccagcctatcaatttatattttaagcagttatcatagttctacaactttccagaataatgttttatacaccaggaagataaaataattggatagtggatttttgtctaggaatagagttgctgaaattaggaaattaaaataacatgtatttatactaaaaattatccattacttatataaaattcagtgtaattgggcatcctgtattttatctggcaacccaacccaaccccactggatgggtattgccagtgtgggaactgttagaattgagggtaagtgtgaaattggcagacagagaaggaaactgcaagaagagancatggatcctatcaacagaatcattcagccattcagacactttgtgacaacctaaaaagagaggagggagtgagatttttgtatgaagtaagaattcacttgtttgtacatgaacagcatatgctagcctgctttgaagactgaagttcttggctttccagtttataaaccagttctatctgggcagcttgcagccaaattgtgttgtggaggaatgggactcaggaagcacgggcaccctgaaataggtggatgtggtctgtggaaaaggtggaagcacacactagggttctacccttaagaaaatgaacctttgctgagttatcaaagtgagtacttgctatttctcaggatagccatgccacaaacacatatttacagtaaaattcaagttggtaacaattaaaatgactgacctctagtttatctatatattattggaacaaaagggcttactgagcaatgccaaggaaagaaacttccaagtgggttcttcttactctacataaaagaataaactattttaaaagacttttggcaagtccactgtttatactaccataagtcttacctttctgttttaaagcaagcttggcaggacagttacttggaaataagttgtcagtgtttggtcggagtggtagcagttgtgtctggaattcttcattcttttcctcgctctccaataacctaccctgtgaggctgtctccaaccccagagccctgaccaagtgaccatgctgctaagctgcttgataatagtttaatatcagtaaagggacacaagtttaaaattatttgacatattagtgctatcagttaatgacttaaaaatagcatctttggtttctaggtgttgacaaagattctctaacttaccaaactttagccatgctcctctgaacccccttcttgactaggccttaacttcctatcacaactacagattctcaacaccaatgatttcatccactcgtgccccacattaaaagacttacacaaacactagaataatttctaacagctcaaggccacatccctaggactaccctaccccacttaggatgcctgcctgaggaagctcaaggttgccaggagagtttactatttcttctagccaacaccctggagctaggcccaaccaccctttcttagagcatttactaaaaagggcttacaattgtgaatccttgccctgtaacctttgataaatatatgcacttcctactgctcaagagtgtctttctcaaggacccaagagccattcttctaaaaagtaaccatcaggagagagagggcctctgtcttttggtatctgggcagatagaatcctaactcccataattgtctaatcaactttaatgttgaccaaccctttgtaatttttcactctctgacttcactgagcctgctctcaccccttcccttttctactctctcattcctcttctgaaatacacagtctcctctgtgcaaatcaaggttgagttcagttcacactgcactcccttccctattgcaatagcgtattagtggttcaaatctgtcctccccactttaactagtgtctggcttcctttatctctgacagtgtgaagaatttggaaattgcaaggagcatgggaaggagatgatttggggtaggcatcttttattttttaaatcacattgcatacaggtggctgtctcttctgctcatactcctagaacaggcctttggtgtattttgctatatataggagactgggactagaaggtcaccctgttcagctgttttcagactatcattaggttgtaaatggaatccattaaaaaattatatggaatgcacaaaataaagcaggtgaaggcaaaattactcttatggaaacaggggtaggaaatctagaatcgtatttattccttcttttctctttatacttatttggggagtcttagcctcattaagaacaactgggagggtaaaacacaagtttacaagaaaactagtttcctccctttcagagttctttccatcctggcagctgaatggactcagcagctctcgggggcagtggcttgagtgtgctgggcttgtgtctcctaaataggaaatactacccacaatgggataaaggacccacagggactctataactgggganttagaggacacatcttgtgtaattctggcagaagggctaggcatgaagtcagagcaggagatgactcagaaatcctgatgcttagagacattaccctgtggctactgggatcactgcgatgaactttgcctgaggtctgtaatgtgatttacaataattattctattcccttactcactagcttgacaagatgaacaagttaatgttattagcttctcaaattggaagatgataattattaggtgggtccattgggagtcaggctggggtgagttgttatcaaatcagaaggagttatcagtagggcactagtaatcaataatgattgaatgtgggctaccagaatttgccttttcatgatgtatacaggacttgtttacataaccangtcttcaagaagataaaattaggaagacatccagataacagaaatgtggagagaccttgatatcatattatgattgagaaagaaaaaacacatagacattgacattgggaaggaatgactacatccagttatggcagcaaagctgtgtgttgattgatattgtgagaatgaatcagtgattgggcactgtggctaggacagaaagggtgaccctgagagccacagtgcttttgtgtgtgacagccatgaagaaagcttatctggacttgatattgacccgttgtgtatttccgtattttttctctcttttctctccttttcctccactctttccctcttctctttcaacctcatgttgaaaaaaaacctgaagtttgcttgtggaaatgggtgagatttgtgagttatgatgaattggaattatttgcaatcaaatggaaagttgtaacaacaggtgtggatggatgcagctcacacataatgcatgtggtgaattgaggaagctggtagaagtttggggcgtgattgacaggtttaaatgtagcagaaatagagtagttgcttttggcattttagatttttaaataatactttgntcaggccacacattagttagtcagacacagagttggaaccatatttggaaccttcggagcctccacgtgggcttgttcatcgtccttatgttagggtgacaaggttcggagctaaaaccagagagagaaagccacagcagaagcctcttccagacccactgtgtcagttttgaactgaggcattttctgtccacagccatatgcagtgtgaacaggccacagatgtacatcaagtgagtgggtgaaataacgtttggtgggaaatgatgacagttttatggcattagtccttgaagccccaggtgcacttattcatctttaatatattttaagctgttagccttggggatatttcagcctgtttgcanctgtattttaaagatgagccctggagtgaatcagtgaggggagcgagtcatacctgaactaggagaagagatgaatgaatctttgtaggagaagagttaagtggatctagttatccctgaacaaggagaatatatcagggtaatgaagagacctagaggaaggtcatcgtttccttttaaccagccagctggttgaccttcctgcacctgccttagagccaaccttggcctgggcagcttgcaccaagctttgcatatgccccttggatgtcaggatgctatacctggattatcctggcacagagcatgaattataattcctgatctcagcatattctaccctttgacttctntgttagggattttgactcttctgcttctgacttttcgatgaatcatgtctccttgacagagagaaggctcttttttttaaaatgactcatagccatatctatatataaccactgagtgataaataactcatagccatagctacatatggccactgaattgagtgattaataattctgttgttataaatttgagtgaatatattttggtcaattatgtggttgtggctataaagatagctaataatctttattagaatttggatactgttgatttttttcttgtaattttataacttccatttccctgtggtacatatgcagtgtggaatactatgcagacataaaaacaataaaatcatgtcctttgtagcagcatggatgcagctggaacccattatcataaatgaattaatgtgaaaaacagaaaaccaaatntcccatcttttcacttattagtggtagctgcttataagtaactggacacacacagacataaagatggaaacaatagatactggggactccgaaaacagagagggaggggggcaagggctaaacaacttcctnttggatactatgttcactatctggacaacaggatcaatagaagcccaaaccttagcatcatgcagtgtatccctgtaacaaacctgcatatgtactcgctgaatctaaactttaaatttaaattnnaaaaaaaattcaatgtttggacttaggcttaaatttctagaactttttccacctctaagttgtcattatacaaagtatgtttaatagtagctggaagagttatttaaatccacacactaacagcaaccacagtgaatacggtttaggtaatattttcttttatccaacagctagagtgagatgcacagaacaatgaacaagcacctcaagaccttggacttgttagagattcagagtgagtttcaaagcaagaaaaggcaggaacatgagtagcattcctataaaatagctactgaagcagagtagctaaggaaagatgattgttgtagaaacacaatcagtgaaatagtctggtagaaagactattccttaaaattcttatactcccatagaatttacttctaaaccatactgcccttagacttgagcaanaatattccctgcccagcccngcatttcagaggatcctaattaaaccctcctcttgccttccccttccccacagggtgagcattctgtaagtccaagtaatcatatcccctaaccctcccatgtaagccatggtctgggtatctggactctagaatttcctgccagggtagtccaaaaccaagacacaggtctatccttcagggggaagtttgcnttccacacaaagggaggccaaggggcagggaatgtgaatgaatgagaaaccatggcgtccatacataagtttgcaaatctcagtgaaagaataagttggcatgaagagaaggaggggtaggagagagcctgggggccagcttcttctgaataagtaaattctggtgcagggcttttcttaggtgcgttgcatatgttacctcatttaatcctgcagaacacttcagggtagtgttctactgtcacattatgggacagggaaatgaggctcaggggagttaagtaacagacccaaggcaactgacttggtaagaagttgagctgagattaaaccttaggtgattgagctctaaagtgcatgtatttttctaccttgttatgctgcctgtgatcagtatctttgcttttataatttcccagttctttccagaacctagcctggtccttgcacttggtgacatgcaataaatatttgctgagtaactaacaaaacagaccatttattcacctttactagttatttattatttatgtatttattcacctttactattaatggtatatacaatacaacagtggtgtaggtgaggaatttcatgtcaaatatactgaaagggacagttcactcctgatccatctgtactggatggatgtgttgatctccctgtggccatgtagcttttgggcttatctctccatttgtcagtttagtaaattgctgcaaatgttctggctagcaaggactcaaatgtcccagaacaaacttttgctcaaagaaaatattaataaacaccatatatgcttctgtagtccaaaatgtttttcttttcttacttaaaaatggcacaaactctgagtattaaggtgattcaagaagttgtgagaatgcctgtttctcaggagttgattggcagggtccctctgttggtgcggccctgcttgtctgggctgtagttcttccatgtgtgtgggccacccatgctggctcctggantggtcagtgtgctgtcctggggcttggtctttccctccgctcacccccacttatcatggatgccaagaccattctctgctgttggcagaaagccatggaacatacttccctaattcctgctataggctcatttggtattttccccatgtgctcccatttgtacacttaattgtttgggcttatttgtctgtcttccttgctaaactgtaggctcatttgcgcacaggctttgtgtctctcttgtttaccattatatcatcacatctaacacaatgcctggtacatagaatacttaatgaatttttacagaatgacaatggactgccatcataattgagtcattaactactttttcaaaaaagttctagcattaaggtatcagatcaaagtttcctttcacaaaaatcttacattttcctctatactgtaattgtatctacctgcttggagactcaccaagagtgtagtcactgtgtaccctcccagagtgactttttttatctcatttagaactatttgttactgtgattctcttaagcaaatggttttgcccacgcagagctgtttgctcactgacacaggcttaactggttaaagaactcacaggttgtttctcaccattaatggctattatgttattttaccatcagttatacctcatttctgcttctatctttacaactgcaggctttggtcatttttaaagtcgttcaagtttagattgcattgacattaaatcaaatcatagaggacaaacaactatatattttcaccgagagtgggcacagtaaagagttcccaggctttctctccgacttttagataggtctttttcagaagcttcctatctccctaagaagtctgagagttattacaatttctttaccctttgcttacatatcccatcacatagaaaaccatttaatagaatctattgtagcagaggcagaactttacctctgctctcatagagtcccaggtagaactgatggtgaaattgacataaggtagattaataggtanattagtccattctcatgctgctaataaagacatacctgagactgggtaatgtataaaggaaagaggtttaattgactcacagttctgaaggtctgaggaggactcaggaaacctacaatcatggtggaaggggaagcaaacatgtccttctttacatggtggcagcaaggagaagtgctgagcgaagcaggggaagtgccctttgtaaaaccatcagatctcatgagaactcactcaccattataagaactgcatggaagtaaccccccacccatgattcaatgacctcctactgggtccctctcatgacacatggggattatgggaactacagtttaagatgagatttgggtggggacaccactaaaccacattaataggataaaagcatgtaagttttacataacacaggagccctcataaggaaatgaagacccaaacaagtggccaaacctaaatgcttttatacttggttgaacaaagagagacgactgtgaaaaagtaactaaattatgtgggaagactaaaggaagatcaataagaattattttaacaaggtctgtgtgtacagaattctcttagttgtgactccccatcaaagaatgtttcttttctcctggcagaaagacagcaactttcacatgtgagattttatctcctgttttcagggaaaaaagggaaaagattagggtgcgctttttgcatctgctgttattcaagtgcccttagttcaaactaatccttataccaaaatggcatattctggggtacatattctgccattcttcactactaaataacagaacatatgcttacctatgtactagctatttcatttctggtatgtgccaaacagaaacatatatgcatgagcccaaaaaaatctacaaaatctttataccagcattatttgtaataatccaaatggaaaacagtccaagtttccatcaacagaagaatgcatacctaaactgccatatagcaaatatatagtgaaatattatacagcaatgaaaatgaaacagtagttttactgctataggcaacaatatagatgaatataataaacataatgttgactaaatcaattaaaaaagagtacatactgaatgacttgattccatttgtataaagttcaaaaattggtcagataatattgccatttgggagataataactgggatcctgtctttttcccttggagagctagaagaatggactcttctcagaaaggtgaccaaaacttcataaaatctcctttccccagaacattattatttacttacctaggtgctgccaaccacaccccattgtgtccctttagtcattgtatggaaggaggtcaaatgccttagtctcccagtgactagagctagatatccagccatatgaacagtttgttaaaaccaggactctgaattctaatgcccaataaggagggttgtacttttgtgaaaataggctggtgacaattatctgaggtcagaggaaagattctgtcatcatcattgtcatgatcataattcttattttggtttctttactcatgtttttaaaaattatatttgtagaagctattatgttaggtttaatagaaatgtagaaaaaacataaaaatcatttgctcagtgtgatgaattttcatatactgaatatatccatgtaacttccacataaatgtttgcgatactcatctatattgttgcctgtaacagtaaaactactgtttcattttcattgctgtataatatttcactatatgtttgctatatggcagtttaggtatgcattcttctgttgatggaaacttggactgttttccatttggactattacaaataatgctggtagaaacatttttgtagatttgttttggctcgcacatacacgtttctgtttggcatataccagaaattaaatagctggtacataggtaagcatatgttctgttatttaatattgaaggatggcagaatatgcaccccagaatatgccattttggtataaggattagtttgaactaagggcacttgaataacagcagatgcaaaaagggcagtctaatcattttctttttcttccccctgaaaacaggagataaaaactcacatgtgaaagttgctctcctactaccaagagaaaagaaacattctttgacaaggagtcatagccagaagaatcctgtacacacagaccttgttaaaatattcttattgatcttcctttagtcttcacacgtaatttagttacttttccacaattgcctctctttgttcaaccaagtataacagcatttaggtttggccacttgtttgggtcttcatttccttatgagggctcctgtgtcatgtaaaagttatgtgcttttctcctattaatctatcttatgtcaatttcattatcaggtctacctgggactctaagagagcagaggtgaaattttgcctctgctacagtaggttctattaaacggttttctatggcatgggatatgtaagcaggggataaagaaattgtaataactctcagacttcttagggagttaggaagcttctgaaaaagacctatctaaaagtaggagagaaagcctgggaactttttactgtgtctacctcagtgaaaatacatagttgtttgtcctctataatttgatttaatgtcaatgcaatctaaacttgaacgactttaaaaatgaccgaagcctgcagttctaaagatagaagcagaagtaaggtataactgatggtaaaacaatataatatctgttaatagtgagaaacaatctgtgagttctttaaccagttaaacctgtgtcagtgagcgaatagctctgtgtgggcaaaaccatttgcttaagagaatcacagtaacaaatagtagttctaaatgagataaaaagtcataagaaacattatgtacctgatggaatgtttcaggtgaaattgggtcactcgactggttgttcatccttacttaattcttaaaattttctgatggcctaagagtgaaagtttctgaatttagctgatcatattttaggaaaaacacaggacaaaatttaagttgctgaattaaagtgtctagtgttatccctgatttttaggcaagtccttatacttatcttttacctttaaaggagagtcagagatacctagcagaatggttaaataaaaagtaatgacaagagcaaatgcttgcaaggttgtggagaaactgggccactcatacatggataatgggaatgtaaaatagtacaggcactctggaaaagagtttggcagtttcttaaaaaactaaacatgtaagtactacactatccagtaaatgcactcctgggcatttatcccagagaaataaagacttctgtgttcacagaaaaacctgtatgtaagtgtttatagcagtcttatttataatcgcctaaaactggaagcaacacagatgtccttcagtgggtgaatgattaaacaaactgtggtacatctacaccacggaatactactcagcaataaaagaaacaaactactgatacatacaatgatctagatgaatcttgagagaattatgctgaatggaaaaagccaatccccaagggttgcatactatatgattcaaattatataacattgttgaaatgacaaaattatgaaatggaaaacagattagtgtagattagtagttgctagggattaagaagggaaggaataggaggaaactgggtgtggctattagaggggcaacatgggagatcctgctgataatggaactgttttatatcttgaccatatcaatgtcaatatattggttgtgatattattaccatgggggaaaactgggtaaaagatacactgattttgtattattttttataactgcatgtgaatctacaattatctcaaaataaaaaaataaaaaataaagtacaagagagtcagggaaagttctatgtagtttctcttagatcagtttttattttttaaacagttacccatccgtttcttaaatcttatggattgttattaaaggaaggccactgcctctgctttccattaaggacaatatcaatcatcaaagacatctacaaagtttctgaaattcttcatgcagactttcaggggaccattagatcatattattttacctgtagggatatatacaatcaggcacaaatcttagatctttaagaagcagtatagctgaactgctgcttaaataagtgggaggttggttgaggttattttccccctataattgcttttcttctgtcccagaagaacctgtcagaccagtcattaagctattgtttagttctcatttggcttaggtggttcagggatcagcttagggaataatagaggcaatgtaatgaatcttagtgggaataaagtgattgagaattttggtttgtttttaaggcttagaatataatatccattctctagttccatgactgccccaatgcaattctttttgaaatgctgtaacttatagcctggggagcctcaccatgttcttttagttttttcctcttctatgtcattgtgcacaggatcttccagcttttgggttaccatgtctttgagttttctagtctgaataagatctctttagaaatcatatttttctgagagctatagttgactatactttgttttctgttgtttcataggattatctcacaaatcctacggtgaaaccatatgaggttcacagtaaccatatgaggcgtaggtattatcacctccattttatacagacttaaggaagctaagtaatttgtccctggtcatgtatgtgacagaaccagaatttgagttcagaaagctaacttcacagtctacacagttagcctctctttatttttgtttttgtctttgttttgagacggagtctcgctctgtcatccatgctggagtgcagtggcaccatctttgctcactgcaacctctgcttcctgggttcaagtgattctcccgcctcagcctccctgatagctgggactacaggtgcacagtaccatgcctggagttagcctctctttatacaatacagcatctttgagttnggattgacagttctgttctttcaagagacactttttgagacctgtcatcttttaggcactgtgctgggtcctatggataaaaaactactgaacatgattcctgtaacagagatgctcctagtttattataaggacagatgttaggtgcagtgtgaaaaataaaatgttagacaaacaatctcttacagtctcgaaaatattcaaattcagactattttagagacagcacatccctgagaacaaaatagtaaatagtcaatttattcatttgttcattcacccaacaaaaattcttttgagtgtttgcaatatgttgggtgctaagctaagtcttggagatagagtggtaaaggaaacagatgaggtcctgcccttatagagcttatttaccttttagtgaggcatttacttaatcaaacgttcatagaaataaacagaaaattggagctgacaagcaccgtcaaagacagacacatggtgctaccagaggaaattaatgagagagttagttcttgttggggccatattacctcagagggaatagctcagaagtaaataggcattaactaggtaaagaatgggagcagggggcagaggagacaaaaccctgtagcagatcagggcactgaaattccgagaactgaaagaatgccagagagacctcaggagagagaggctgcgggtggggggtggagggtggtaatcatgctaattgaagcccaagagacatccagaggccagacaaagcaaggctttggggtggtagtaaggatatttaatcccaagaacaaaggaaagtcactgaaaataactgagtgacaaagtcatatttgttatttagacagctctttttagcttggcacataagtattggtgagaagccaaggtatgctggggaaagaccagcagagaattgctgaagttacaaggccagatatgatagagctttggctagagctgtggtataaggatggagggaagtggaggggtatcagatgtagttgggaggtaagggaagaaatcagtgatagattaaacaaaagccaggggaacaaaagagtaaggttgatactaagtttatctgacagttggtggtancatttactgggatagggacattggaagcagatcagatttggaaggcagattttgaattcaattttggatatgtttggtttagggtgactttgagagggagaaaagaaacatcaagtagacacttaagtctgtgtctggagcctagagtggaggtccacactggagatacacccgtgtgtatcataagtgtacaggtggtacatgacatcatggccatagatgccactgcctagagatacacaaaagagtgagaagaaaggagagtctggaaccaagctttaaggaacttaatctcacatctatgtgaacgaagatcaacctacagaggagatggaagaatatcacaaagataggtagagttacaaaaatgaaaggatgatatattttgataaagatcggatggtcagcaatataaaatgctgctcaaataacaggtttaaaccagttctttggagttattgacatggaagtcattggcaactttagcgaaagctattttatgaggaaaaaggtagactggagtgaagagtgagtgaggactggaaaattggatgcaatgagaacagagagacaaaacttataagaagagaagaacaggacatgtaggatttggggaagactttctagataagatggaagagacttgagtatgcttaaaagccattggtaaagacttaattgacagggctctgacagctatttcagagagaaaataggtaacgggtagtgttagctcatgagaaggggaataagcagaaagggatttgcggaagtgcccttaattgcatggttggtatgagaaagataagagaattcacctactgggaattatatcttcctgtaaggttggagacagtattattggctgaaggtgaggggacaagaaagagaggtaaaggtgtgaaaagagctgaaaaagtttgaaatatgttagggttttgtgtgtgtgtgtgtgtgtgtgtgtgtgtgtgtgtgtgtgtgtgtgtgtatgtgtgtccatatatattcaatgtttagctcccacttgtgagaacatgcagcatttggttttctgttcctacatttgttcacttagcataatggcctccagcttcaaccatgttgctgcaaaggacatgatctcattttttatggctgcatagtattccatggtgtatatatagcacattttctttatgcagtccaccactgatggacatttaggttgagtccatgtctttgctattgtgaatagtgctgtgatgaacatatgcatacatgtgtctttatggtagaattatttatattcctttgggtataaacccaataatggggttgctgggttaaatggtagttctgacttaatttctcggagaaattaccaaactgctttccacaatggctgaactaaattacattctcacaagcagtgtgtaagcgttcccttttatctgcaaccttgccagcaaattaaaaaaaaaaacagtattttttgactttttaatcatagccattctgactggtgtgagatagtatcttattgtggttttgatttgcattggcctaatgattactgatgttgaacatttttacatatttgttggttgtgtgtatgtcttcttctgaaaaatgtctgttcatgtcctttgctcactttgtgatggggctgttttttgcttgttaatttgtataagttccttatagatgctggatattagacctttgtcagatgcatagtttgcaaatattttctcccattctgcaggttgtctgtttagtatattgatagtttcttttgctgtgcaaaagctcattagtttaattagataccatttgtcaatgttttatttttgttgcaattgcttttggcatctttgtcatgaaatctttgccaagaccaaagtccagaatggtattttgttggttatcttccagcatttgtatagttttaggttttacatttaaggctttaattcatcttgggttaattgttgtatatgatataaaaaagaggtccagcatcaatctgcatttggctagttagttatcctagcaccatttattgaacagggaatcctttccccattgcttgtctttgttgactttgtcaaagatcagatgattttacgtgggtggtattatttctgggctctctagtctgttccattggtctatatgtctgtttttgtacctgtatcatgctgttttggttactgttgacttgtatagtttgaagtcagataatacgatgcctctagctttattcatttgctgaggattaccttagctattcaggctcttttttggttccatatgaattttaaaatgggtttttcaaattttttggaaaatgtcattggtagtttgacaggaatggcattgaatccgtaaattgctttgggcaatatgaccgttttaacaacattgattcttcctacacatgatggttgaattttttttattggattgtgttatttcngatttctttgagcattgttttgtaattctcattgtagagatttttcacctccctggttagctgtattcctaagtattttatttattttgtggctattgtaggattgtgttcttgatttggttctcagcttggatgttattggtgcatagaaatgctaccgatttttgaatattgattttgtatactgaaactttgctgaagttgtttatcagatctaggaggttttgggcagagactatggggttttctaggtataaaatcatactgactggtggagccaagatggctgaataggaacagctccagtctaaagctcccagcgtgagngatgcagaagatgggtgatttctgcatttccaacagaggtaccaggttcatctcactggggagtgtcggaaagtgggtgcaggacagtgggtgcagtgcaccgagtgtgagccaaagcagggcgaggcatcacctcacccaggaagcataaggggtcagggaattccctttcctagtcaaagaaaggggtgacagacggcatccggaaaatcaggtcactcccaccgtaatactgcacttttccaacagtcttagcaaatggcacaccaggagattatatcccgtgcatggctcagagggtcctatgcccacggagccttgctcattgccagcacagcagtctgagttcaaactgcaaggcggcagcaaggctgggggaggggctcccgccattgcccaggcttgagtaggtaaacaaagcggctgggaagctcgaactgggtggagcccactacagctcaaggaggcctgcctgcctctgtagactacacctctgggggcagggcatagccaaacaaaaggcagcagaatcctctgcagacttaaatgtccctgtctgacagctttgaagagagtagtggttctcccagcacgcagctggagatctgagaacggacagactgcctccgcaactgggtccctgacccccagtagcctaactgggaggtaccccccagtaggggcagactgacacctcacacggctgggtactcctcttagacaaaacttccagaggaacgatcaggcagcaacatttgctgctcaccaatatccactgttctgcagcctctgctgctgatacccagggaaacagggtctggagtggacctccagcaaactccaacagacctgaagctgagggtcctaactgttagaaggaaaactaacaaacagaaaggacatccacaccaaaacctcatgtgtacgtcaccatcatcaaagaccaaaggtagataaaaccacaaagatagggaaaaaacagagcagaaaaactggaaactaaaaatcagagcacctctccttctccaaaggaacgcagctcctcatcagcaacggaacaaagctggatggagaatgactttgacgagttgagagaagaaggcttcagacaatcaaactactctgagctaaaggaggaagttcgaagccatggcaaagaagttaaaaaccttgaaaaacgataagacgaatggctaactagaataaccaatgcagagaagtccttaaaggacctgatggaggtgaaaaccaaggcatgagaactacgtgaccaatgcacaagcctcagtagccgatttgatcaactggaagaaagggtatcagtgatggaagatcaaatgaatgaaatgaagtgagaagagaagtttagagaaaaaagaataaacagaaacaaacaaagcctccaagaagtatgggactatgtgaaaagaccaaatctatgtctgattggtgtacctgaaagtgatggggagaatggaatcaagttggaaaacactctgcagggtattatccaggagaacttccccaatttagcaaggcaggccaacattcaaattcaggaaatacagaaaatgctacaaagatactcctcaagaagtgcaactccaagacacataattgtcagattcaccaaagttgaaatgaaggaaaaaatgttaagggcagccagagaggaaggtcgggttacccacaaagggaagcccatcagactaacagcagatctcttggcagaaactctacaagccagaagagagtgggggccaatattcaacattcttaaagaaaagaattttcaacccagaatttcatatccagccaaactaagcttcataagtgaaggagaaataaaatcctttacagacaagcaaatgctgagagattttgtcaccaccagggctgccctaaaagagctcctgaaggaagcactaaacatggaaaggaaaaaccagtaccagccactgcaaaaacatgccaaattgtaaagaccatcaaggctaggaagaaactgcatcaactaacaagcaaaatcaccagctaacatcataatgacaggatcaaattcacacataacaatattaaccttaaatgtaaatgggctaactgcttcaattaaaagacacagactggcaaactggataaagagtcaagacccatcagtgtgctatattcaggaaacccatctcacgtgcagagacacacataggctcaaaataaagggatggaggaagatctaccaagcaaatggaaagcaaaaaaaggcaggggttgcaatcctagtctctgataaaacagactttaaaccaacaaagatcaaaagagacaaagaagcccattacataatggtaaagggatcaattcaacaggaagagctaactatcctaaatatatatgcacctaatacaggagtacccagattcataaagcaagtccttagagacctagaaagagacttagacgcccatacaataatgggagactttaacaccccactgtcaacattagacagatcaacgagacagaaagttaacaaggatgtccaggaattgaactcagctctgcaccaagcagacctaatagacatctacagaactctccaccccaaatctacagaatatacatcttctcagtaccacaccgcacttattccaaaattgaccacatatttggaagtaaagctctccttagcaaatgtaaaagaacagaaattataacaaactgtctttcagaccacagtgcaatcaaatcagaactcaggattaagaaactcactcaaaactgcacaactacatggaaactgagcaacctgctcctgaatgactaatgggtacataatgaaatgaaggcagaaataaagatgttctttgaaaccaatgagaacaaagacacaacataccagaatctctgggatacattcaatgcagtgtgtagagggcaatttatagcactaaatgcccacaagagaaagcaggaaagatctaaaatggacaccctaacatcacaattaaaagaactagagaagcaagagcaaacacattcaaaagctagcagaaggcaagaaataactaagatcagaacagaactgaaggaaataaagacacaaaaaacccttcaaaaaatcaatgaatccaagagctggttttttgaaaagatcaacaaaattgatagaccactagtaagactaataaagaagaaaagagagaagaatcaaatagatgcaataaaaaataataaaagggatatcaccactgattccacagaaatacaaactaccattagagaatactataaacacctctatgcaaataaactagaaaatctagaagaaatggatcaagtcctggacaaatacaccctcccaagactaaaccaggaagaagttgaatctctgaatagaccaaaaacagactctgaaattgaggcaataattaatagcttagcaaccaaaaaaagtccaggaccagatggattcacagctgaattctaccagaggtacaaggaggagctggtaccattccttctgaaactgttccaatcaatagaaaagagggaatccttcctaactcattttctgaggccagcatcattctgataccaaagcctggcagagacacaacaaaaaaagagaattttagaccaatatccctaatgaacatcaatgcaaaaatcctcaataaaatattggcaaaccgaatccagcagcacatcaaaagcttatccaccatgatcaagtctgcttcatccctgggatgcaaggctggttcaacanacgcaaatcagtaaacataatccagcatataaacagaaccaatgacaaaaaccatatgattatctcaatagatgcagaaaaggcctttgacaaaattcaacagcccttcatgctaaaaactctcaataaattaggtattgatgggacgtatctcaaaataataagagctatctatgacaaacccacagccaatatcatactgaatgggcaaaaactggaagcattccctttgaaaactggcacaagacagagggatgccctctctcaccactcctactcaacatagtgttagaagttctggccaggacaatcaggcaggagaaagaaataaagggtattcaattaggaaaacaggaaatcaaattgtctttgtttccagatgacatgattgtatatctagaaaaccccatcgtctcagcccaaaatctccttaagctgatangcaacttcagcaaagtctcaggatacaaaatcaatgtgcaaaaatcacaagcattcttatacaccaataacagacaaacagagagccaaatcatgagtgaactcccattcacaattgcttcaaagagaataaaatctaggaatccaacatacaagggacgtgaaggacctcttcaaggagaactacaaaccactgcttaatgaaataaaagaggatacaaacaaatagaagaacattccataatcatgggtaggaagaatcagtatcatgaaaatggccatactgcccaaggtaatttatcgattcaatgccatccccatcaagctaccaatgactttcttcaaagaattggaaaaaactactttaaagttcatatggaaccaaaaaagagcccacattgccaagtcaatcctaagccaacagaagaaagctggaagcatcacgctacctgacttcaaactatactacaaggctacagtcaccaaaacagcatggtactggtaccaaaacagagatatagaccaatggaacagaacagagacctcagaaataatgctgcatatctacaaccatctgatctttgacaaacctgacaaaaacaaggaatggggaaaggattccctatttaataaatggcactgggaaaactggctagccatatgtagaaagctgaaactggatcccttccttgcaccttatactaaaattaattcaaggtggattaaagacttaaatgttagacctaaaaccataaaaaccccagaagaaaacctaggcaataccattcaggacataggcatggacaaggacttcatgtctaaaacaccaaaagcaatggcaacaaaagccaaaattgacaaatgggatctagttaaactaaagagcttctgcacagcaaaagaaactaccatcagagtcaacaggcaacctacagaatgggagaaaatttttgccatctactcatctgacaaagggctaatatccagaatctacaatgaactcaaacaaatttactagaaaaaaacaaacaaccccatcaacaaataggcgaaggatatgaacagacatttctcaaaagaagacatttatgcagccaaaagacacatgaaaaaatgctcatcatcactagccatcagagaaatgcaaatcaaaaccacaatgagataccatctcacaccagttagaatggtgatcatgaaaaagtcaggaaacaacaggtgctggagaggatgtggagaaataggaccacttttacactgttgttgggattgtaaactggttcaaccattgtggaagacagtgtggtgattcctcagggatctagaactagaaataccttttgacccagccttcccttactgggtatatacccaaaggattataaatcatgctgctataaagacacatgcacacgtatgtttattgaggcactattcacaatagcaaagacttggaaccaagccaaatgtccaacaatgatagactggattaagaaaatgtggcacatatacaccatggaattctatgcagccataagaaatgatgagttcatgtcctttgtagggacatggatgaagctggaaaccatcattctcagcaaactatcacaaagacaaaaacccaaacaccgcatgttgtcactcataggtgggaactgaacaatgagaacacatggacacaggaagggaaacatcacacactggggcctgttgtggggtgggggtgtgggggagggatagcattaggagatatacctaatgttaaatgatgagttaatggatgcagcataccaacatggcacatgtatacacatgtaaccaacctgcatgttgtgcacatgtaccctaaaacttaaagtataataataataaaaaataaaataaaatcatactgtccgccgggtgcagtggctcactcctgtaatcccagcactttgggaggctaaggtgggtgaattgcctgatctcaggagttcgagaccagcctgggcaacatggtgaaaccccgtctctactaaaatacaaaaaatcagttgggcatggcagcatgttcctgtaatcccagctactcgggaggctgagacaggagaattacttgaactcaggagatggaggttgcagtgagctgagatcgtgcaactgcattccagcctgggtgacagagcaagactccatctcaaaaaaaaaaaaaatcatactgtctgcatacagatagtttgacttcctctgttcttatttggatgccttttatttttttctcttgcctgttgttctggctaggagttcgagtattgtgttgaatagagtagtagtgatatttggcatccttgtcttgtgctggctctcaaggggaatgcttctagcttttacctattcagtatgatgttggctgtgggtttgttatagatggttgttattttgaagtttgttcctttaatgcctagtttgctgaaggtttttaaaatgaagtgatgcttaattttattgaaagctttttcctcatctatcaaggtgatcatgtagtttctgtttttagttctgtttatgtgatgaatcacatttgttgatttgtgtatgttgaactaactttgtatcccagggataaagtctacttaatcatgctgaattagctttttgatgtcctgttcgatccaggacatagtttgctagtattttgttgaggatttttccacctatgctcatcaaggatattggcctgatgttttctttccttcttctgtttcttccaggttttggtatcagaatgatgctggcctcataaaatgagttagggaggagtccctcctagtcagtttttttgaatagtttcagatagaattgtaccagtcagctctttgtatgtctggtagaatatgcctgtgaatctttctagtcctgggctttttctggttggtaggtgttttattactgattcagcttcagaacttgtcattggtctgttcaggatttgaatttcttcctagttcaatcttgggaggttgtatgtttccaggaatttaccctgaaaaattctaggttttctagtttgtatgcataaaggtgttcattatagtctctgagggttttttgtatttctgttgggtcgatggtaatatcccctttaccatttctgattttgtttatttggatcatctctctttttttttctttgtttgtctagctagtggtgtatcaattttatttattctttcaaaaaaccaactcctggattcattgatntttcaattttttttgttttgcatttcaatttcattcaattctgttctgattttggttatttcctttcctctgctagcttttgggttggtttgctctttttctgtttcctctaggtgtgatgttatgttgttaaattaaaatcttcctaactttttgatgtgagcatttagcactataaactttcctcttaacactgctttaatattgataagatagagattctggtatcttgtatctttgttctcattcatttcaaataatttcttgatttctgccttaatttcaatgtttacccaaaagtcattcaggagcaggttgcttatttttcatgtaattgtatggttttgggtgatttccttagtactgatgaaatggtttggctctgtgttcccacccaaatcttgccttgagttgtaattgtcataatccccacgtcaagggtgggaccaggtggaggttattggatcatggaggtggtttcccccatgtggttcttgtgatagtgagttctcatgagatctgatggttttataagcatctggcatttctcctgcttgcactcactccatcctgccgccttgtgaagaaggtgcctgcctttcctttgctttctgccatgattgtaagtttcctgaggcctcctaggagtgcagaactgtgagtcaatgaaactttcttcctttataaattacccagtctcagatatttcttcatagctgtgtgagaataaactaatactactgatttctattttcattaagctgtggtctgaaagtgtggttggtatgatttccgtttttttgaacttgctaagaattgttttatgacacattgtgtggttgattctagagtatgtaccatgtgcagatgagaataatgtatattctgttatttttggttggagagttctgtagatgtctgttaggccaattaggtgaagtgttaagttcaggtctcgaatatatctatgttagttttctgcctcagtgatccatctgatactgtgaatagggtgttgaagtctcccactattattatgtggttatctaaatctctttgtaggtctctaagaacttgttttatgaatctgggtgctcctgtgttgggtgcatatatatttaggatagttaggtcttcatgttgaattgaaccctttaccattatgtaatgcccttgtctttttgatcattgtcagtttacagtcaattttgtctgaaattataatacaaacccatgccttgcttggtataattttcttcattcctttactttgagcctatgagtgtcactgcatgtgagatgggtctcttgaagatagcatacagttaggtcttgtttcttcattcaacttgccactctgtgtcttttaattgggacatttagcccatttacactcaaggttaacattgacatgtgtggagttgattctgtcatcatgttgttagctggttattatgcagacttgattgtggagttgctttatagtatcagtgatctatgtacttaagtgtgttttcatggtggtgggtaatgttcttttcttttcatatttggtacttccttatggacttcttgtaatgcaggtctggtggtaatgaattcccttagcatttgcttcnctgaaaagattatacttctcctttgtttatgaaacttaatttagccagatatgaaattcttggttggaatttcttttctttaagaatgttgaatataggcctctggcctcgtctggcttgtagggtttctgctgaaaggcctgctgttagcctgatggaatttcctttgaaggtgacttgccagccgggcgcggtggctcacgcctgtaatcccagcactttgggaggccaaggcgggcggatcacctgaggttgggagttcgagaccagactgaccaacatggagaaaccccgtctctacgaaatacaaaaatacaaaattagccaggcgtggtggcacatgcctgtaatcccggccctggggaggctgaggcaggagaattgcttgaacctgggaggtgaagactgtggtgagctgagatcgcttcattgcatgccagcctgggcaacaagagcaaaactccacctcaaaaaaaaaaaaaaaagacttattttaatgagttggactcagattagctaataaaaattgcctaagtgtgaaccttcatatttcctatgtatggggaatgttacgaggtatgctggtgggaacacaggagagcacatggaatgattatcccccacttgcagaatttcttgtttggctagaaagggaacatacttgtacaaaaggcataaaaagatgtttaaagaggtgagcaaaggctcagagagtaagagaaagtagagactacagaaatattccataaaggaagattcaggaagaagtgtgtcagaagtagagcaagagcgaaggttggatttgctgactactactaatccatttctcaggagcatgtgcagatgcacatgggaggttataatgtcggtatctgttagaaccctattctgttggccagaagtcaatcacacaaccccacttttctgctagggtggctgaaaaatactttacctgtgttcctggaaggaaagtgaggcttttttgagcatttaaccagtctctgctacacacccactggaactttgcagaataaacttcagttcctctcctcctcattcattttttaaaccttcccttctccaagtgagacactgttagttctatcaactattattcatatatttatttttgttcccaaaccctctactatcctggccatcataaagcaaacattcttgatttttattgttcttctcaaaatgagatgctcactgtagaacgtaatactgtatatgtgattttttaaaatgctggtaaagtgggattattgttttcattgatttcataactatcaggtcaaagagagggccaagattggggactttgcatttttaaaaaaagagaatttgaagaaggaaaagggtctccaggatgccacttcagtatggcagctgtgggaagcactagtggtaaggtgctagctattctttcctacttctccaagaggaaaaagggtactcacactcacaaatcaattcatttccatcaaaactccaaagtgaagtcaaggagaataagtgcactcaaatgatgttacttatatattagattatggatttaaataaaacaccaaggatttctgtattaaaatctttttattgtgatgttaactagtccacatgtcttacatagtatctaggtcttatgcttaataatttggccagtagtccaaattattacatgatatataagcaaattagcattgctataagaaactaaaatttatcacctgctgctaatatggcattgatgttgtgccatttcagcatatccctatggccccattcctgatgttttcatctgtagatccagtgaggagagaaaaaaatgagtcgttttttcctgttcttttctttcaacagttgtgctttcagtgttctctgttaagaaatattataaccctgagggagtgaatgttcttatcagagaagagaactggttgaaaatgatttagtttctgaattcctagaagaagggaaaaagcctaagtgtccatctctctatctagtctactaataggattacctatttcaaatatatataatttttctaaattgagtttttaatgtcaaagtttcaggatccactggtttccatagttttagtttgtccagttgtttatggttaggctcattgtgaacagtgaccattatacttctctttttctataaatgtggctgcttttgagaatggaagttgtaggaaacagaattcattgtaatctgaatttaaatttagcttcctgttgcagctcctcccctccccctcctccctcatgtttctccctgtccccagactgtctttcagaggcagatgctatgcacataaatgacatttattgatttgagtattagagactttttcttgacagactcacccatcacaatatttaagtaatattaacagtttcccaccaagaactcagagtaaactaaacagtgagtatccaggcagaaagccatgtacttttagagctcaatatgtttataatatatatgaaggcaaacatagaggcaacataaatacctattctacttggttgtaatctgccaatttatatttttcggagaagagtttatcactaaatcactgagaggcagagtaggatatctgggggaaatggtggtgggcggggggcaagtttgttatctggaaaaaagattgggagccagggaggattttcaaattcgaatccctcagctcagtcttggggcatttgttttgccatctgaattatcttggaacccagagaaaaactggttgtgaaaactacagatgcaattttcttctttggcttttcccataatactgtaattataaaccatgctgtgttagagtggaacattctttggagagcatcctaaagtgcactttgatcaaattttgccttatgtggcaacatttagaaacacaagccttcgtggggtttctggctctactttttactgatgggctgataatcttatagtagcattagttttgccaccaattaccaaagatttgttattattggtttttaaaattggacaatccttaaatgtctacagcaacgttagaaacagacccacaagtgggtgggtcagactagtttggaaacctccaatcttggctatttggtacctcagaattcaacaagggatgttggaaaattttcaaaataaaattaatttaaattcagttttgcaaaagattatactatagaacacattgaaaaagagaaggttagctggaaagtcaaacataatagaatttgaaaattactaggctttaagttatgaaaatatttcccatatgttgagacagaatttgtattctcttttttctcaatggcattttatgagactatatactgctgctcttctgtataaatagaatagaaacatctccatttttaaattgtcatggaaataagtaatggcctgtgaacaaaatgacttctttttgttttgttttgttttgttttgatggagttttgctcttgttgcccaggctggagagcaatggtgctatctcggctcactgcaaccatagcctcctggattcaagtgattctcctgcctcagccttccgagtagcttggattacaggtgtccaccaccatgccccactaatttttgtatttttagtaaagacagggtttcaccatgttggccaggctggttgcaaactataggctgtcactctctatgctttaatattttggttaattttaagggcataatttgtggggacattgttcttatttgccattacttttcatagcaaaaacagcaattacttttgcaccaacctaatatttcctttgctaatctagtgtgacttcggaacagtgataaataaaggttggggaagaaagggctgactagtaaatgcagacagagttgaggcaatttcacagttccattggcgtgttctatgggccatttcactttcagatggtttgtctggctgaatttagaggctaacctctggggttttgcctttcttcttgtgacctgagaatttgctggcatgtacaagtcaattttcttaatagcctttcttgattagtctatagcttcttcagtgagttgatatgtcacatttacttatactaaaatcttacactagacatattttggtgtctttggcatcaaacctcttttagtcatttgtctttcttgtctagagctagtgtcataatattttcattgttacaggtttctaatacactttaagatctagaatgacataactcccattgtatctttctccttttatcttttaagaaaaagaattaccatggaaaataatgcttctgtttctgtgtcgttgtttaaagtatttacaactcttgttgtgaatttttttcttttaatatattcctgaactttatttatatatttaattagttatgtttgcatttttaaaaagtgagataggtgtatcttttcaaaaataatcattgtcaggtatggtattaggtttgtaatagctattagctattacattacttttaatggcaaaaaccacaaatagttttgcaacaacgtaatataatgaatacaataggcttccattgtttatctatgttgtggaatatagtgtaattctgaaataacttacttcttatacaatttttgttttgcttttttggtttagatcgacttttctaaaagtctttttcttttgtttctgctatatatttgttttcctatgttccggtttcgatttctttctggatcagtttcatcacttcatgttttcttacattattgccactgcattagtctgtcacgttaatcagaataggattgtatatggtattcttttgtatatttttaatcttgtttctatatttggtgaaatatactttgtaatttttaaggaaatctaaattttcttgtcttactcttgcagagttctacttacttaattgccgtttttctgctttgatttttattaactcatttttccagccttccttggggtcctgatctttttctaggtcattaaatgaatatgtcattctgttttgttttttattgattcgttcctgtgacttttcttcaggttattttgttgacctttattgaacttctccagtttattgagttgaatattttgttattttattttattcaatttttaaaatgatgagaaccctgaatgccatgtgtttttttccttttgagtccatcctttaccacacatcattagattttatatagatttttcagttgttcttaactttaaaatagtttgtaattacaatttggatttattctttagcctatgccatttagaaatgttttatgttaaggtttacctttgcgtttttatttttaaaggttatcttatgatattaattccactggattatgtgtacgtctttcacatacttatgcattcttgtggtttatataatttctatgttttatagctttcatctgcctctatctaatatatgaacaatttttgatcaactttttacaaaagtattttcttgatttgaagaatccaaacttttaaatgtaactgttagaccaacttcattaattgaatttactcatatgctttatggaccttttaattttccagctactttttctctttaagagagttttgttagactttagtactgtatttctgttagtttcttcttacagttataactatgtgtgtgtgtgtatgtgtgtgtatacacacatgtatatatatttatacacacacattgtaatatgtagtgtcttatgggctacaacattttcttagagtctatattttatttgaagctagagttttttttttttttaagtaagaagttttatttcttcctggaatcttgcaggatttttttttctgtttactcagtagtttaaaaagtgccagatatgttaaggtttaggtcttttactgatttatttttttcctggagccatgtcacccattttcctgagatcaggaaagttttcttgggatgtgtatttggttattgtttctgttttatttctctggactctcctctaggaatactgatgagctatatgttagctccctagtctctgtttttcaattctttcttcttctctattgtacttttattttcctttctccctgtgaaggcttatagaactgttaaataatgcttaagcccactgtctttcttcagtatcaattaattcttctactttgcttttaatttctatgtaatcttcctttaaaaaaattctctctcccttttcattttacccactgtccattgccttgtttaacctacctggaatcctcttcatttcatcctgttttcttttcataaaggccaatttattggttctttattaaggacaccaagtagtcttctgagtttttcttttggattctgcagtaaaaatttttcagaggtttgttctgaatttttggagcactattctctttcccctgttgtgtgttgtgtgtgtgtgtgtgtgtgtgtgtgtgtgtgtatagctcaaaactaaaataactagagaatcaaatatatatatatatattactcaattttaagtaaagccacaaagatacccaagttgagtgggtttttttggtccagctctttttctattacaatggtgttgaaaacttaatatccagtttacagtttaatgaatattgttgggtttagttgccatttcaattaccattttctgttaatttttatttaaagtatctcctctcagttggcttttgatcattcagcttctgcagcctgattctttgatactataagaagttatacacggtatctgtaattctcaacctatcaggattgctcctctgtgctctgttcaccttttctctctccatttctttttttttttttttttttttttgagacggagtctcgctctgtcgcccaggccggactgcggactgcagtggcgcaatctcggctcactgcaagctccgcttcccgggttcacgccattctcctgcctcagcctcccgagtagctgggactacaggcgcccgccaccgcgcccggctaattttttgtatttttagtagagacggggtttcaccttgttaaccaggatggtctcgatctcctgacctcatgatccacccgcctcggcctcccaaagtgctgggattacaggcgtgagccaccgcgcccggcccttctctctccatttcatcaaccaaaggctctacctctgcagactaagccttttggaacatgtggctttacgggcctctctcccctactttctgctcactttttttttcttaaatacgctggaatggtgggagaaagagcatttgcctccaagtaaaattccccaaaccaagaactctgggtcccttttatccaataaagaaaagaaggagtgtttgctttggcagaacatatactaaacttggaacaacacagagaagattagcatgaccctcacacaaggattacatgcaagttcctgaagcgttccatattttcttacgtaatagtaaagggttcgattcaacaagaagagataactatcctaaatatatatgcaccccaatacgggagcactcagattcataaagcaaattcttagagacttacaaagagacagactcccacacaataatagtagaagattttaacacctcactgacaatattagacagatcattgagacagaaaattaacaaagatattcagaacctgaactcagctctggatcaagcagacctgatacatatctacagtattctccactaaaaacaacagaatatacgttcttttcattgccatacagcactgactcaaaattaatcacataaccggaagtaaaacacgcctcgcaaatgcaaaacaactgaaatcataacagtctctcagatcacagcacaatcaaatcagaactcaagattaagaaatccagacatagaggccgggcgcggtggctcacgcctgtaatcccagcactttgggaggccgagacgggcggatcacgaggtcaggagatcgagaccatcctggctaacacggtgaaaccccgtctctactaaaaatacaaaaattatctgggcgtggtggcgcgcgcctgtagtcccagctacacgggaggctgaggcaggagaatggcgtgaacccgggaggcggagcttgcagtgagccgagatcgcgccactgcactccagcctgggcgacagagggaaactcccgtctcaaaaaaaaaaaaaaaaaagaaatccagatataaccacacaattacatggcaattgaacaacctgctcctgaatgactcttgggtaaataatgaaattaaggtagaaatcaagaagttctttgaaactaatgagaaaaaagagacatcataccagaatctctgggccgtagctaaagcggtgttaagagggaaatttaggctgggcacggtggctcacgcctgtaatcccagtacttggggaggcctaggtgagcggatcatttgagctcaggagtttgagaccagcctggccaacatggttaaaccctgtctctactaaaaatacaaaaagtagctgggtgtgtggcacgcacctgtagtcccagctacttgggagcctgaggcaggacaatctcttgaacctgagaggcggaggttggagtgagcgagattgtgccactgcactccagcctgggtgacagagtgagaccctgtctaaacaaaacaaaacaaaacaaaacaaaaaaccaaaatttatagcactaaattcccacatcaaaaatctggaaagatttcaaattaacaatctaacatcacaactaaaggaactagagaatcaagagcaaacaaaaccctaagctagcagaagacaagaataaccaagatcagtgttgaattgaaggggatagagacacaaaaaaatccttcaaaatatcaacaaatccaggagctggtgttttgaaaataattaataaaagagactgctagctagactaaaaaagaataaaagagagaaggatcaaataaacacaattagaaatgataagggggatatcaccactgactccacagaaattcaaataaccatcagagaatactttaaacacctctatgtatatatattggaaaaactagaaaaaatgggtaaattcctggacacatacaccttccaaagactgaaccaggaagaaattgaatccctgaacagatcaataacaaggtctgaaattgagacagtagtaagtaacctactaaccaaaaaaagccctggactagatggattaacagctgaattctaccagaggtacaaagaagagctggtactatttctgctgaaactattccaaaaaaaaggagggactcctccctaactcattctatgaggccagcatcatcctgataccaaaacctggcagagatataacaaaaaaagaaaacttcaggccaatatccttgatgatcattgatgcaaaagtcctcaataaaatactgacaaaacaaatccagcagcacatcaaaaagcttatccaccatgatcaagttggcttcatctctgggatgcaaggttgtatcaacatatgcaaatcaataaatattattcatcctataaaaaaaactaaagacaaaaaccacatcattatctcaatagatgcagaaaaggcctttgataaagttcaacatccactcatgttaaaaactctcaataaactagatattgaatgaacatacctcaaaataataagagccatatatgacaaatctacagccaatatcatactgaataggcacaaaacaaggatgccctctctcaccactcctattcaacatagtattggaagttctggccagggcaatcaggtgagagatagaaataaagggtattcaaataggaagagaggaagtccagttatctttgtttgcagatgatatgatcctatatctagaaaacagatagtttcagcccaaaagcttcttaatctgataagcaacttcagcagtcaggatacaaaatcaatttgcaaaagttgctggtattcctgtacaccaacagcaggcaagcagagagccaaatcatgaatgaactcccattcacaattactacagaaagaataaaatacctaggaatacagctagcaagggaagtgaaggacctcttcaaggagaactacaaaccaatgctcaaagaaatcagacataacacgaatggaacaacatttcatgctcatggatgggaagaatcaatattgtgaaaatggtcatgctgcctaaagtaatttatatattcatgctattcccattaaattaccattgacattcttcacagaattagaagaaactattttaaaattcgtatggaaccaaaaaagagcccaaattgccaagacaagcctaagcaaaaagagtaaagctggaggcatcatgctacctgacttcaaaatatactacaaggctacagtagccaaaacagcatggtattggtataagaacagacacagaaggctgggcgcattggctcacgcctgtaaccccagcattttgggaggcctaggcaggcagatcatgaggtcaggagtttgagaccaccctgaccaacatggagaaaccccatgtctactaaaaatacaaaaattagccaggtgtggtggcatgcacctgtaatcccaggtactcaggaggctgagccagaagaattgcttgaacctgggaggtggaggttgcagagctgagatcgtgccactgcactccagcctgggcaacagagtgagactccatctcaaaaagaaaaagaaaaaaaaaaagaacagatacatagcccaatggaagagaatagagaactcagaaataataccacacacctccaacatctgatctttgacaaatctaacagaaacaagcaatggggaaagcattccatacttaataaatggtggtgggagaacgggctagccatatgcagaaaattgaaattcggccccttccttacaccatatacaaaaattaactcaagatgaattaaaaacttaaatgtaaaacccaaaaccataaaaaccctagaagaaaatctaggcattaccattcaggacataggtacaggcaaagatttcatgatgaaaatgccaaaagcaattgcaacaaaagcagaaattgacaaatgggatctaattaaactaaagagcccctgcacagcaaaaaaaaactatcatcagagtgaacagacagcttacagaatgggagaaaatttttgcaatctgtccatctgacaaaagtctagtatccagagtctacaaggaacttaaacacatttacaagaaataaaccaatggcccaattaaaaagtgggcaaatgacatgaacagacactttgcaaaagaaaacattcatgcagccaacaagcatctgaaaaaaagctcagcatcacgtcattagagaaatgcaaatcaaaaccacaatgagatactatctcacaccagtcaggacagctgtgattaagaataaaaaaaacaacagatactggtaaagttgtagagaaaaaggaatgcttttacactgttggtgggagtgtaaattggttcaactgttttgggagacagtgtggcgattcctcaaagaccttgaggcagaaataccatttgagccagatcccattactggctatatacccaaaggaatataaatcattctattataaagatacatacatgtgtatgttcatcacagcactatttacaaaagcaaagacatggaatcaacttaaatgcccaccaatgatagactggataaagaaaatatggaacatatacaccatggaatgctatgcagccataaaaaaggatgagttcatgtcctttgcagggacatggttggagttggaagccactgtcctcagcaaactaatgcaggaacggaaaaccaaacaccacaggttcttacttataagtgggagctgtatgatgagaacacatgggcacatgggggaacaacacacactggggcctgtgggggtggggtggcttgtggagagggagagtatcaggaataataggtaatgtatactgggcttaatacctaggtggtgggatgatctgtgcagcaaccaccatggcacatgtttacctgtgtaacaaacctgcacatcctgcacatgtacccttgaacttaaaagttgaaggaaaaaacaaaagaaggatatgttcttagttttctatacctatgagccagtcaattggaagtgaaagctgggtatgccaaggaataactaaattccctttacggtttcaaagttagaacctatttttctcttaagattatggaattgattatccattacttttggttttaaaggctgtcttcaatggttttagtgacaagttggtcacagcagcattacatgattttagccagaagctattttgaacctaaaattcctatcagaaggttgaaaaaaaacctaattttacttttatttagagcttgtgtgctaattatttgatttttaaatttccgactccacttggaatgaagacacaatccagtagttaatattaaagtatgaactttcaattgtttcctttcttccttttttttgagataagaatccctcaaaagaataagtgaaacagagacttcaaagttccgtggtgactgttgaaatataacagaatcgcactgtgtttgaatttactgtgatatatttctaatgtcttatatttggtatgtttctcttgttgttattgctgacacaaaccaaagaacaagaatttcttttatgccactgatttgcaaaggtcgtatagaaaatgaagggtcagataatggatgttaatcatcctcattgatggatacattgacaggaaaacataattgaattgcacatattagtggaagataaaaaaccatttcacaaatcgttcttagtagagaaaaaaatgataggagagctaaaattgatgtgaaaaacacagaaggaagttaagggattagagtgggagggaaattagtgaatatctatttgtgtgcatgattgcatttttgaaataattagttgcctaatttgtgtatccaaatatagtaattgtttttccatagtcatgacttaaatattctctgtgtgtaattttcagttgcatacatttttttgcagaatcaaattgcagaggaatacattcatttgaaatttctctagggatgtgtttataacccattttggaaagagtagaaagattttttttctcttccaaatggctatgaaggtggataacttctctgatcttttagtaaacacttttatgttagttgaatggtatgcagttagtcataaacaggagagattgaggaaaaataacatgcttaatgcaaataaattttctgtacctgataagttaattggaattttttcctgtaatcttttttttttttatttttctggtagatgcttgttgatttaaggtaagatagaaaagaatcatcaaactatatgtaaaccacagccaaatgatgaattcatagtttttgctcaagtagagggattatctgaaagtacaaaaagaatttgataattgagaaatacattattttgaatgcacatttgaagtagctaaaaattctacgccacagctgaatgcactggcagtttgttaatcacatccataaacatgagtcttctacaattggagtgggccccacacttggaacatcttgaagatgtttcttctttggctgtgctaaattaagcatgcaaagaagttatattgtgttaacatttccacaatgaaatcttattggcacttcctgtataagtggctgggaatagaaattctcatttatgaatcaaaacactttgcctttttatttggaggtcaacctactaacctttggttataggataataccagcaattttattataaagtgtatttcagtaattggaactgtgttttgattatacaattggatagaatgtataataaaatgaaatgaaagaaatttctcccagaagattgagttaaaaatgttttggtgatgaaattgagatgatgtccagatttatagcatgtttggtaaccataacatacttctcgatatattgaattccatgtaaatgcttatttcttcaaaccctttaaatttcagagtattttctcccttctgttattaatcagttctattcatagtggatcttagaaaattatccagtgattaatatttctccatatttgtagctttcattactttatatttctgtttttgcctaggctccttgttaccagcctgttctaatgtcacaaaacttggcaaaccctacccaagaagggtaaggtttagtatctatgaattttgaaaatacttgatgagaaaagttgcttttaaattattttgaatcttattaataccaaaaatatttgaaaaagagaagcaggtacatttttccaatattcaaatttcattcaatgtataaatactcaaacctttttttataaattatactttaagttctgggatacatgggcagaacgtgcaggcttgttacataggtatacatgtgccatggtggtttgctgcacccatcaacccatcatctacattaggtatttctcctaatgccatccctccccttgccccccacctcccgacaggccctggtgtgtgatgttcccctccctgtgcccatatgttctcactgttcaactcccacttatgagtgagaacatgtggtgtttggttttctgttcctgtattagtttgctgagaatgatggtttccagcttcatccatgtccctgcaaaggacatgaactcattcttttttatggtggcgtagtattccatggtatatgtgccacattttctttatccagtctaatattgatgggcatttgggttggttctaaatctttgctgttgtgaaaagtgctgcaataaacatatacgtgcatgtgtcttttgcaatagcatgagggaaggagattggaaaacattgactcattgtacaatttaaatacgccaactttgtcaacttttattacaactggaaagcacttatggtacttattagaaagaaagtgtgtgtggatacgtatgtgtgtaaaaatatggctcttcttaaaaggaggcttacccagtcatttttttttgaataatagctgcattggaggtaagaaggtacctcaagacattttctctaattgtgcaggaaaaaacaaataaaggagatgaagactaggctgctgtcattctgtgccatctctgacatctatggaaagcctagaggcccaagaatacttcctccccagggtgctattgcagtatcttcagggtcctgagtctgaatgttcctattttatgtaagcattgtacccagaagaatgggtcagaacctctcctatggtctgaatgtttgtgtccctccaaaattcatatgttgaagtcctcacctccaaggtgattgtattaggagttgaggcctctagggggtgtttaggtgatcctcatgaataggactggtgctcttataaaagaggccctagggatctccgttaactcttccaccatgtgaggacaccgtgagaaggtgccatctatgatgaagctggcccttattagacatcaaattctctggttccttgatcttggacttcccagtctacagaatgtgagaaataaattactgttgtttataagccattgtgtttgtggcattttgtttatggcagcccaggtggactaagacagccttttaataggcaaggggatctaaagacataggtgaaccaagcaagtcagtctgcagctcagaaaactcaagtccccattcaggcagctgcctgatgatgttagctgtaatctcctgtgtttgtgcctgacttgctgcctcagtttagctcagtggttctcaactgggggcaactttgaccatagggacattaggcaacgtctggagacattgtcacagctagaggaagggtgctactgccatctagttggtagaagccagggttgctgctaaacatcctgcagtgcacgggacagcacctcctcccatcccagcaaggagtcatctgtaggaatatttgataaaagccatctacataaaagcccaacagctcacatcataattaaagatgaaagactgcttttcccataagattgggaacaaggtagtaatgactgttctcaaatctctattcaacattttactgaaggtcttagcaacagtgcaagaagaataattaaaactcatacaatttgcaaagcaagaagtaaagcagcttttattcacgtatgacataaacagatacttaaataaccataaggaatagcttccataaaggggacttgaaccaataagtgagtttagaaaggtctcagtatctcagtcaatacaaatttaatcatgtttataaatacaatggacaattaaaactaaatatttaaacatttcatttcttataatgccagaaaatagaaaatacttagtagcaaatttaatgaaatatgtgcacaattcttatactgaaaactataatttaccaagataaatttaagaagacttcaataaatggagagatatactttgctcattgatcagaagactcaataacaatttaggatattaatttttcctgaattaatctatatattcaaatttatcttaatcttcatcacaatggcttttattttataggaattgacaagcttattctaaaatttatatgggagagtaaagaaggtagaatagtcagaataatcttgaaaaacaacagcaattctacctgactctataaaatatagttgtattataactgtaaaaatacagttgtattaaagattatgaggttttgacataaggatagacaaataaatgaaggaaataaaagagtccagaaatagacacacatttataaagtaaattgatttttttcaagacaccaaagcaattaaataaaggaatggagaggcttatttataaatgaaattggaataaattgatatccatatgggaaaaaaataaattttcactccctaaattcacacctcagacaaaaatcaattcaagatggattggagacctaaaagcaaaggtaaaactctgatacttcaagaacagaacatgacaggattcagaaaattataaccctcaaaattggtaaattagactgctcatcaaaagacatacgtaaatgagtaagagagccactaacaggacaaaaatatttgtaaaacatatctgacaaaggactttaatcaatatcacataaagcacatctacattaataagataaagaccaaagaaaatagctcaataaaaatgggcaaagcatttcaagggacactttacaaaagtaaatatacaaatggccaatgaacacagtaaagagtgctccacatctttaggcttcagctaaatgcatttacaaccacaaagaaataccaccacacatccactagaaaggacaaaattaaaaaggttgaaaacaccaaatactggtgaggagttagaaccactgaactcttacacttgttgataggaaaattaaatgttgtaactactttgaaaaatgttttgcagataataaaatgttactttcacctaccctttgacctagcaattccactcctattgtttacccagaagcaaattttatgttacacataaaaaattatatcatacataaatacttgttaaaatattcataaacccacatattcataaacccacatattaatcaaaagagaatcaataaacaaattttgtcacagttatacaatggagtattactccgcaacaaaaatgaatgaactactgatacctgcaacaaaatgagtgactctcacagacaaaatgctgagtcaaggaatcgagacaaaaaggaatacatgtggtatgattccatttctaggaagttctagaacaaaacttaggttagaaaaagggaaaaaggttagcctctgaaagggaagactgaccagagagatgagagaactttctagggagatggaaatgttctgtatcataaggatgtgggttacatcttttttttgtttgtttgtttgttttgagacagagtctcgctctgttacccaggctggagtgcagtggcgccgtctctgctcactgcaacctccgcctctcaggttcaagcgattctcctgcctcagcctcccgagtagctgggactataggcgtgtgccaccatgctaggcgaattttttgtatttttagtagagatggggtttcaccgtgttagccaggatggtcttgatctcctgaccttgtgatcgcctcccaaaatgctgggattacaggcatgagtgcccggccgcgttacatctttttaagtattttaagtaaattggtagtcagtgttcaggaatccttctaatgactcttcaacaggggtggcttatgaaatagttcatcaatttttttttctgataaggggaggttgaggcaggaggattgcttgaacttgggggggcagaggtttcagtgagccgagatcataacacttcactctagcgtgggtgaaagagtgaaactgtctcaaaaaaaaaaggggggaatttacactcttgaaaataaatatttcataaggaaactttagagttctccaatatacatgatcaaacaaggacctgttaccattttggaccatgtcataatagagaggagatagttcaaaattagtcatatgttccaacaacaacatgattatggaaactagtcttagaattgagagtaattgaagtttttgtttttactggtattaataaatggtattactcaattcgttgacagtaccagtctctgcaatatcttttgttggggaagggggagaggacctgttcgtctaattagaaacacatctacattttaagaataaaatattttacatatactttttgttattaaatctgcaaactctagaattggaagaaatagccttcataactcttcactgcaaaagttatgaatgtttgatagaattaattaaagcattcagtagaattagacttgtttggaaggactgtaggatctttggcaagaagtgtgttttatattgtttcagatgtataccattttctcttaaggtttacaagttaatcaataaagattcttggcagagctaagtacaaaagaacaatatgtatttcgcataccaaatggatctaagtcttaagtgttatttgatgtctcgaaatgtttggctttcaactttgtttaaatgaatagtgtgtatacagtgaagacaggctttacttagccatgcctagaccctctgtggattctctcataatcctcagttattgtaaaccatacttagtgagaccaaaaggatattttgttttggctgcatggtattattggaaaacggtaaaaattttattctttaaataatgtgtttttctattcagaaaaataatgtctatagagatagttatttcaaaatgtagttttcaatatgcacttgtgggtatgaacatgaacaaacacatgcagacacacagagtctgacgttatatctagaatgttgaatcctacttttctacttaacaggaatgtttccctatgtaacgaaaaagtctgtataatgtgtctctattatgtgtattatatgaattatatatcctaatttacttaaccattcttttattgtattggtcattttcccatattgcatacaaattattagggaacatctgtgtgcaaacatttttatttacattttggattatttacttagaatagattcccggaagtgaaactaccaggtcaaaggcttttcccaatttatttttcaaaaagaaattcccactgtattctatacaagtatgcttgtctcactgcccagttgctagccttacatggttttttttttaattttgttttttataaatagaatctcattgttttagtttgtatcttttggattactagtgagtttgaaatttaaaaacctgtcttttcaggcctttgtcttttagggtttttaggattttcttaacgattagcatcatctcttctctaaaaacgttatatttgttcgttatattgtaataggtttttttttgcttttagctattaagcttttaattatatacttgatttttaatttagaaaagtaaaattttcttcaatggagttcttttttaaattgaattctttgacatttttattattttgttcaaagaaccctatgggcaagtggaatcttacacttttattacctggatagcggataacattcatagtttgatatttaatctgtagcatatagttgacttttatttttggaatatccttgctttaaaactacaactaaaggaaggcagatggttagcttgttttctcatttcctgaaaatgtccaagattggaaccaatattatcagtctgtaatggaggttggcaatgtcaagatggtttgtatccatgtcaagatgttgaatcagtgtccaggtcattgctcattaaagatgttgctctttggataaacaggaaacccagaaaaaagattctaacaatttttgatgctacctcacattccttcgagacagtgcagaacatttcgttctttagaaaatattcaggtctctttctttgtgttacagcacttactatttgtctatttgtattattggcttgtgacccttttttggggggttacaaatacactaggggaaagagtatttttaaaaatcattatgcctttgctttatctatgtctgtatactctcctatttgttattattatttttatttttgagacagggtctcactctgattgcctaggctgcagtgcagtggtgcaatcacagctcactgcagcctccatttccccaagctcaggtgattctcccacctcagcctcctgagtagctgggaccacaggtgtgcgccaccatgcacagctaactttttgtatttttagtggaaatgggatttcactatgttgcccaggctggtctcaaactcctaagctcaagcaatctgcccacctcggcctcctaaagtgcttggattacaggtgtgagccaccactccctgcctcctatgtattattctatatgtattttttcatattaatgtataagttttttcaagtatgggttattccatttgaacaaaccattaattctctgctcgtctatagtcatttcttattagatgtgtcagttcttaattttatcacacattaatttctttttttgttccttatacattttgtttccttgagatcttcagaatgtaaatcaatctccattctgttatgatttataatcatttacttctcagatgattcctcctttagtgctttgtgccttctgttatattcttattacttttgatcttttattgttctaatttcacctcttctcaacccatccccacactggcaactgttatatgaatggctggtcagatggaatccacatatgttccgtatgcatgtatagattttactcaagccactagtggagacactattcctacttacacatatgagtaccaacctctctgtgatgcagcaatcatatcttgacatatctagaaagtttcatcctcatccataaattacttcatctttctccaaataactcagggaattttacattaacctacccaatttaacaatttaggaaaaatcaattcagtgacatgaggtaaaagatgcgctgtcaaaattgcagtgtctctaaggtgattctttttgaccagactagaaacactaatctggcactattttagttggggtttcctggtacctttccatgccataaaaatctctataaaacagaacaaattgcacatttaattatagtttcaaaaatttgcattcttggatgaaactttttctcttgtcccactcttgccataattgctacattgtctactgttaatttgcattttaactgagctttaaacatttaaccagaggatggtccaatcggagattctataaccatctcagtaattggtaggcaagttattttttattgctatttcagcagtagggaagtctcctctacaggggtggggaaagagttgataaccttcaaaacagactctttactttggggctgtgatgagagaaacagaacagaagttaggaatggtgaaattagaagagacagatggtgagagattatcatgatttataggatcacccaaattgtctaaaatttactccagaactttttaccagttagggcaaaatgtcatgcttattttgagctcctatagatacatttaaatcagacatactggactttgcattctgttatttttttgaggggggtgatatttaaggagttctagaaacagcctacattagacttagtgtttccagcaactaacaaatttaaatgttataaacatttttctaacgcattttcctttaaaccactctggggaaagacatgaatgtaagatgactgattctcagattatctgcttttagaacaaccttcttttagctgcaaaaacgtagtgacggtgttctcaatgtgagacggggaagattttagtgggcacagcagctgttgactcaaatatagttatacatgttccttctgtgttttcttgtaggtgaatcagcagtttagtttattatgaaaattagcaatctataagatgattctgaaaaatgaattctcagaaatttaaggtacacacatggcatgatttggtgaatatgaagtgctgaagtgaaatactcatatcccattgtgatcattgatgttcttgttgcaattatggtcatcatgtcaagaacaaaatcaatttgatgcgattgaaaataacaaaaatgctttatgtcttttagagaaaatataaatgattcattgtaaatgagaaacctcaaactgaaagcacataaaataccaggtatgagtgttgcattttgaagtctctgactacatgagagttgtctgtgaaataaaatatccagttacacaaaatattctttatagttaaaaaactttttttcatacatatcactagttaactatttttagtcccatctttcctatgtgcccagcagtgagctaaaagctgtgcatttaatgcattcttcattgtatttttgttttgttttattttgttatttgtaaagatgggaaagaccaaatgaaaagatgtcaaacttttctgggggtggagaggacatttgcattttgaatttagaaacctaaattagaggtttaggaagactcataaatatgtagcagaggtttggtggtcacagctagaagctgaccaccaccatggggcaaataatgatttaacctcctcctgtaagtatttgatgtaagatcatcggtatatttcatctgtgacattatccaagaagaagatgaatctgagggaaacaatgcttgcagatttgagggggaaaaatgcttggagtagttagtctcgggatagccctaggtgatgataatccttgcacaaacacagcacactgttagaacagacaaaagtctgcagaggttaagaagacccttgttacattggaatctttcaatcacttctagaaatatgatttagttaaatcaatattttatttagctctaggtacaatattgatgctaaagaagttcttgttgaaccaacaaatggatgctcctttaaaatgctggaggcatcataaatggcatgttagcatcaggtacctccctcttggagcttacacataaaaacaaatgtacacaaatagcaataatcaaataaaatattaggggattgtgtcaaatgagagctagtgacaactgttgatttaaagattcagccatttcaaagttttagaagttttagggatataaactaaagagtccagagaaagcagggaaagtataaactatttctgccaaggatggggattttgaggcaaggttggatattgctattaggaagaagtggcatttgagctgggtaggatttttacattcagaaatgtgaataggcacgtgtagagaaaaggaggcagaggattctggattgagggaatttattaattcttcattctacatttgctgattacttcctatatacaagatactaaactaagtgcaaggcacacagggtaaataagaattttagttcttgtctttgaagagccttcccgcagtagaggaaacacgtacttacaagaggcaagcaatggtgccctaaggcctgaagggggcgcctctcctacacagcaatacgagggtggagtttattttcatggcacctcaacccatctgacagctaggggagctgcattttccaacagaaggtgcattttgtatatttgtaggctgttttatacactgctttgtgctgaagttattcaggcatttctcttccctctagaccttaagttcatggaggccacaagctaggttttaccatttttgtatccgtctgtgctgtctagagtagtgccttggacacacagtaaggattaaagactttcggaatataattaaattttgcttttactgggaaataaaatatatctcatagaaggcatggttgtcctattcttcatctagtctttcaaagtctttacagtgtgttgtgtggcagaggccaacagtagttaatactgtgttgaagccatacctttcatacttgatgttatttttgaacaatgaaaactttgcaggaagttctcatccctttgtggctaagatattttccattaagggggaaacaaaaagagaaacattagcaagctactcatttatttcttttaaagttacttgttagaaagtcacctttcaccccaatttcacattgaatttaagttcattcctacctatctgacagtaagtcaatattctgagattgtttcggaggcttcttatttttcctcagctgtaaactgaattaccttttaaacgattttctagctaacagtaaatggtccataaaacatatgaataaaaatgaaggcaaacatttcatgcttaaatagctataatggtagtcggtgtaatgggctggagtttcaaaaataaccagtgatgaatctcttagcggccacatcatattatctgtggtttttgcagaagtgtcatttgcagctattctgacacacatcttactctagttggcaatttatgatgttttattctatgtaaacaaatgtctgtctatctttagagtacaaatatctacggagatcaaatgtaagaaaaaagtggccctgacttggtttcattgttgtcaaaaatggtctttaagaatgttgtttttctttagacaatattacttaagtatctacaatggcttgttgtatttcatgggaatggtattactttacagcttctgccagggtatgtatcaatcttctctctcactaaggaaacagacaaattctgctatttcttaaacagttttttgtggcacttataagaattatcatgtttcccgggttgttgtgacagactgaggatagctatgcctgaattcatggtgacggtaaagagaacgtgtagtgttaaacgggcgtcctgtttgcctgaagttgtccaatcaaaatgtcttcattgataccagctattttcttaaagctctgtatttgctcagaggcactgaaatgttcctttcccctttccttgtgcactctgaaacattttagaatgcttttcaaatcttgaaatctggtgattgcatttgaaacagttttataaacatgcaaacccactcatgtgatctgctgggttttcgttgaaactgccactcacatgccagggtttgtacaaatagacctgaaaggaattctcaaggtcattttattgcaatccatatttgatgaatttgggaagttgtgggcaccacgtcactctgtgaacttgtagcagggagctgaggctggtaaggtagtatctctttattttcactttagtagtgttatattcacacatagcttttcttcttagggtagaagtcttcctctgctaacctttgatttttttgaaatttcatttttttaattcttcaactcccaaacagattcgttgtttttcttccctgtaattttttatttatatctgtgtgttttgattaaggttactttctagttgtaatggggagcattaggcaggttttttttttgtttgttcttttctaaataatcaggactttacacaaagttacaagctcaataagcaacagccgaatccttattctacatatttttcagcagagtgccttatcagacactatgtcctctctaaagtctgcacaccaatgtctatgacattctagacagctattctttagtacacctttgtacttcaggtcccctttgtggcggtgcatgtttgccaggaatccaaaatctgttaatgactgttgtacttgctattatattatatcatataattattatgtagactgatgtaacatataagtaaagagaagtgtttatgtgaaaactaaatagaatgctagtaaatttgctaaaaaaattactgtagaattagatgtaggtgagccaatcataaaagattgggaggaaatgtgaatgattcttagattgcttctcaagtgccttaacttctcaattacaaagaaacactgtaagccatagatgatgcataatggatgttcttgatgtaagacattgtagaaatctaactaagagattcaaactcaaagcaaaggccttggctctacatcaaaagagtagccaactatgtgcatttaagtgttgccatttataaagaatacttgaggtattatttctgaagattcttgactttaatatattcatttaacaaactggccaactacctatcctgaatatgtcatatgagagggcttctaacatgagaataaatcacaagcctctagctgttctctattttaaagtggggatgaaaggtgaacaaagtgttacagattctcactatttgagtatctaatagtgatggggaggctgtcctgttgccttagttgtcctggagaaatatcatcggggcctcttttctgtgatgcagctcatggcagagtacaccactgtcatcctaaacttttagctaaaagcagataacacacttctttttcatataatgcatttgtatctgaattaggactttagtgttacggttaagacctacaggcattgattactttggggtgaagtctggtgaccaaagacagtgttcctaaaaagtgcaacttcctgggagtttccacacctagctaggagattgtctcagggactttttacccagaagataactctattattggtaggcttaataatagcagaaatacaggctaccttattttcatgattatgcatttttaacattaatttttaatttccttgagatcaggtaatagaaacattaatagctctctatactaccaggcatagttacctaaaacaaggtgagtgctaaataggtgtaaaaataatgatcaagctcccaaagtgtactatttagttattttgcatgacaattttaacagaaatttgtctcctatcacaaattgcagttttaccatatcaattagttggatcttgtctcatctttccgttcactgtgctacctagtgtggatgattctgcgtattttaatgttgagatgtgaccacactgtattcattcagctggtttctcagaactcgctgaatatgggacagtttttttttttcccagtagtgagcttgactctgtgcataggaaatacacgcagtcctcatgtgcctttcccttttctgcagatggtagttcatgagcctccctcaaatataacagcagctcataggtgaatttatcaaagagtatggccaccttgggagacctggcacattttacaggccctgctgtgatatagaacaatcaactcaatttttttatgtgttctttccattattgtaactcccatgaggtaaagtgttaagctacattaagcctcattaagagaaatttgagttcatgatgcatatgtaacttcgcagtaattgtaattagtacaatctgcttcttgaatttgctaacatatttgggaaaaatgttaccattttttatttcttttaaaacatttaatgccaaaaacttttcagtagagcatttagtacctctcacaaaatttcataagtggctttgattgtgtgcagaattacatcaaatgattaggagcagacagttcatgaaactaagaacataatttacaacatttgtaacaaaaaagtatactttgagtctcaaagtatgagtaaaacctgaaattgaattttttgaagtcaactatctcctatatattaaccaaaatttatgaaaaaatatctatgacaaaataagacaaaagatgggcaatacttctaatagaagagggagataatgcattaggaagcactctctgtgtagatactaatgaacctgagggtataagatggagataatattagaaaacatggtaatatagtacatactgctcataattatagtcagaaattttaccacccctctcagtaattggtagagtaagtagacagaaaatcagtaaagatatagaaacttgaaaaaacaatcaaataactgcatcaacattttagaacactccacccaacaacagcagaatatacattcttttcaaatgtgcatgaaatatttaccagtataaagtatattttagaccataaaatatatctcagtacatttaaaaagatttcggactatgttctcaaactacagtggaattaagttataaatcagtagcagaaagatgcctgggaagtccccagatatctggacactaaatatcatgcttccaaataactcatatgtagtggattgaactgcagcctccaaaagcatatgcctatgtcttaacccttggaacctgtcaatatgaacttagttgggaaactgatctttgaagaagtaattaagttgaggatctccaaatggaataatcctggattatccagctgggccccaaacccaacaaaacgtgtctttataaaagaaagaagacaagaggacatagatacagagaacatagtaataacaaattttatttgtttcatttgaaatcaacaaatttttaatgatgatggactccatgtggtttctaagctggagcttctcattatttctatgaaagccacttagaggaaaaagaatgttttcactgtcactgaaaccttgggatcttcatattagaccaaattaaacaagttaccacaggacttccaacctacaatatgctaatgcactcttcaatcttcattgatcaaatgtagcatattccagatttttttttaccgtataatccttttttccctgaatagtcttgcctgacaaatagagctcattttgagaaatatatatatatatatatatatatatatatgtttatttctctcttgttctttaaagattaatttctgtatcacatgaatttctgtatcacagaatccttttagattctgtacactaggaatgataatgacttacttgttttatatgttgagtaatgttgtttaaaacgatgttatttctattgaaatagagtatctctcatttttttttccttttttcctgttggccagtctggagtgcagtgctacaatcacagctcactgtagactcaacctcccagactcaagtgatcctcccacctcagcctcctgggtagctgggactacaggcatgcatcaacaggactggctaattttgtacgtttttgtagagacagggttttgctcttgcccaggctggtctcaaattcctgtgctcaagccatctgcctgcctcagggaggcaatcccaaagtgttgggattacaggattgagccaccatgctcggccccttcttttcttattcttactttttctattatttttcacttcttttactaagtttattattaactaagtaagttaataattaacatttcttttgcttaatttttaaaaaaagggttggtcatgttaaaactgtcctgaataagatctactatctattgaaataaattcttgttcctttcataaatttattatcatttagaataattctttgtaaagatttcatagatttcagccatcgtagttggtatactacagaaatgacagtggggagagacaggaataaagttaaagtagtgtggatatagaatcagtacatttagtgactttttaggaatggcaaataaaggattattgtaatttctgttttggtttccttggaggttaatatttcctactgaaatagggaaatctgaaggaagagcaaatttccacaggaacgacaagaagtttgattttggatttgtgtggttttgaggtactttcttgtacgtttggagaaagtatctaacagggaattctgctactgaaacaaagtagagtgagagggaggggtagacttagctcccctgaccttgtatgtatggagaaagtatctaacagcgaagtctgctactgaaacaaagtagagagagagggaggggtagacttagctccccctgaccttgtatgtatctctttttcaatatttatttctaaactagtttgacaatgctgcctatgaacttaagcaggtgcctgaaatgattgaaacgtccttgtcagcaggcagtgtgtttcacatgttaagttcagtaatggtgaacttaatgtcctctgctatattgacctccaaagccttagagatttgtggcctaagaattacaccagatagatttttatctcagcccttattttagataataaacatatttttaattagtaagttaataattaacatttatagagccttaatgtgagcctggccctgctatatattatttatgtttaccaacttgcttagctctcacaatgatgctatttactgatgaagagttaagtaacttctcaaggcccatgatgcatcctgttttcaggcatcaggtgctgagggtttgttccagcagcctctgacatctggttatatgaacctgaggccacgaagtgtagctctccctgcctcagattatatctataactttggcttgtacttgttcctggtttgtttcttactctcttgttttatttaagctactgttagtgacttagtaatgttttcagataatttctattctgcaaaagttaaatttaattatattcactaattattcatcctattaaagaattgagacttccaggaagatggagtatacatagctttccctattcctcctgctaaatacaactaaaaatcttggatattttatatatatgtgtgtatatatatttatatatatatatgtatgtatatagaggaatactctgaaatatggagagaaggcagaaggcagactagcttggggccttgggaccaaaagaaaaacatattaattgctgtgtcacatgagtttcaatcaatttagattccttactctaggaatgataatgacttacttgttgcatatgttgagtaatgttgtttaaaacgatgttatttatatagaaatagagtatctctccttttttcttttcctttttgagacagggccttgttctgttgcccagcctggagtgccctgggttttctttttttctcatatataccagacttggagcttaagaaatcaacaacatgggctgagtgtggtggctcacgcctgtaatcccagcactttgggaggccgaggcgggcggatcatcaggtcaggagttcaagaatagcctggccaatatagtgaaaccccatctctactaaaaacacaaaaaattagccaggcatcgtggcagtgtctgtagtcccagctactcaggaggctgaggcagaaccatgtgaacccgggaggtcgaggatgcagtgagcccagatcatgccattacactccagcccaggggatagtgtgagactctgtctcaagaaaaaaaaaaaaaaagaaatcaacaacacaaaaataccaatgcattacatggtaagcaaaaacattcttaacaaaagcatgctttctataattaaaggaccagagagggtcaacctaacaagacaaaacttttagataataaccaccatattccaggtaaataacagaaaaagcattgtggacccagtcacatctatacctgcaaaagccatgtcgggagcttaggtttttacttttttgagattctgatgaagtaccccaatgtccacactgggatagtgtcagaaaaggcaaggagggaaccaggagttttatcatcactgagctccatttctattctcagtgtcagtggagaccacatggtaattctggacttccaaagccatctggaagtaatagggtgctctttcttctcctgactgggctggtgtccgtggaggcctagacaatattcaggaccttcaccactgccctatgataacaaggccaccctcattacagtgttccaactgggagttggaactcctagaattctcaccttcacccagcagtaataaggagcctcttcctaagatgctgaatggggaatctgggctttgcatccatgtggaaatcatgaggcagtaccacctgccccttcacctgccagagaagtgtcagagaaagccaattaaaacagaagatttaaataagaaatggcatctcttaacataatttaaaaatgaacaggttttaataaattattcttataccaagaactagatctcaaaatgaaggaaaattgcaattaatagataccaacactgagatgacagaggtgttagagttatttgacaacagttttaaaatagtcatgataaaaacgcttcaatgagcaaatctgaacacctttagaatgaatgaaaaagtagagaacctgaacaaggaaagagaagccctcagcaaagaaataaaagagaaaaagatgagccacgtggagttttagaactgaaaaatacaataactaaaagaaaaagcttagtggatgggcagaatacaggagataaaaaaataataaaatggaagacagaaattacctagcctaaacaacagaaaaaaaataaatgggaaaaacaaaacaaaacaaaacaagagcctaatgggcccatgtaattataacaaaagatctagcattcatgtcatcagagtacagaaagagacgagaaagagggatgggatgaaaaactacttgaagaagtaatggtcccaaacttcccaaatttggtaaaacacataaacctgagtgaaccataaacaggataaacccaaagaaattcataccatttcataattaaactttcaaaaatgaaagacacaaagaaaatcttgaaagcagccagagaaaaattattccttacttatataagaaaatcaatgaaatggcagtagatttctcatcagaaaccatggagaccagaaagaagtgacacacatttttttttatgtgctgaaagataagaattgtgacctatactgagtgaaaacaccctctttaggaatgaagaggaaatcaagacatacttagataaaaacagattatcaccaggagatctgctgtaaaagaatggctaaaggaagttagctaagcagaaaggaagtaacataaaaaggaaccttggaacatcagggaggacaaaagaacatggtaagcaaaaatatgtataaataccatagactttccttctcctgagttttctaaattatgtttgatggttgacaaaaattataacattttctggtgtggttctaagtgtatgtagagaaaatatttaagggaattataagtgtggagggttaaagggacgttcaaagaggtaaggtttctatacttcactttaagtgataaaatgacaaaaccaatagactttgatacattaaacaaatatgatgtaatacctagagcagctactaaaaaagttgtacaaacaaaaagtaaaacagtagagttaagccctagcataccaattattgcagtagctgtaaatagtccaaatgcaccaattaaaaaacagattgttacctttttttgtggtaagaagacataaaatctattctcttagcaaaatttcagtatatgatgtaatattatgaactccagccctcatgctagtacattacatctctagaattctttatcctatataactgcattatgctatggtacacaggatggtttccttgatttcttgtttggatagatcattattggtgtaaagaaatgcaaatgctggtatgttggttgtgtattctgcagccttactgaattcatttattaattctaacagatttttgtggaattttgtatcatgtaatctgcaactaggaataattttacttcttcttttttgatatggatatatttttaaatctgtttcctctctagatgcttttgctagaactttcagtattatgttgactagaagtggcgagagtgaggatccttgtcttgtactggcttttagaggaaaatccgcttttccccattggatatgctaattttcttttgtttgactgtagtaatcattttattatgtatatgtatataaaatattgttttatataccttaaatgtatacaattaaaaaataaaaataaaggcacatgatgtaaaggaaaaaacaaacagaagaaacttaaagcaaaacaaagcaaaaaacaaagactggcattatggaataaaaaatatgacctaactatatgctgtctagaagcaactcacttcaaatataatgatataggcaagttcaaaattaaaaagataaaaatgtatatcatataaatattaatcacagaaaagcagaaatagttatactatctgataaggtagacctcagagcaaaaaaaaaatactagtgacaaagaggtacattataaaatggtgttaaaagaaaaactttagacaaattaaatttaacaagtttaatcaagctaagaatgattcgcaaattaaacaacccccagaaccagaatagattcagagcaactctggcactgctgtgtagtcagagagaatttgtggaaagaaaaaagaaagtgatgtacagaaaatagaaatgggatactgaaacacctggattggttacagctgggtgtcttatttgaacaaggtttgagtagttggctgtctgtgaatgctaaagtatggctgctgtgattggctgagactctgctacttacaagagtaggttgctgtctatttacacaccctgttaggttacagttcactatatacatataaaccatcaggcctaacttaaaatgtgtaaggagtcagctttaggcaagtttaattaggcatggtaaaagggtcacttcaccaagaaaatttagcaatcttaaatgcatatgcagacaacagagctgaaaatatccaagcaaaacctgatggaactgaaaggagaaatagacaaatcttcaattacagttaagactccagcccttctttctcaacaattgatagaacaactaggctataagtcatccaggatatagaaaaactcagcaccatcaaccaactggatctaatcaacacttagagaacattcctttcaataacagcaaaatacacattttccccaagtgtctatagaatttataacaatacagatgattaggccatgtaaagaacctcaaccaatttcaaaacaattaaatcatacagagtgtttgttctttgaccacagtggaatcaaaccagaaatcaataagagaaagataatagaaaaatctgtaaacatttagaaactaaacaacaacagacttctaaaaatccatggattaaagagaaactctcaagggaaataaaaaaaagttaagcttaacaaaagtacaaatgcactataaaatttgtgggacacaactaaagccatgccaagaaaaaaatgtatagtaccaaatacatacattaaaaaagagaaaaagactccatcaataacctaaacttttacctcaagaacctagaaaaaagaaggtaaaattaaacccaaagcacacagaagaaaagaattggttttgtaggctgactggggaaaaataatttatacaaccttgcttctgttaaaaaaaaaaacatgagttcaaaaaacacattgtggccttcaaaatgccaataccctattaaattaccagaaattaaaattaataaattgattgatggttactgtaatgattaagataatggttacttgtggtgaccttttttccaatcataaccaaacatatctctggaaatgagtcactaaggatgatgcagcatctttctttctcttttgattaatcaaaattatattaaatatattttatcttatattaaagaacagtttagtcatgaatttaagctggtgttagaggatagctaagttgcttctcatagtcatttccttacttatgtaatgaagagcagaaaaatatttttaccagtggttctcaaccttggctggaaatcagaatcacttagggagcttaaaaatatactgatgcctgggtcccatccagcgagattctgaattgttctatggcagaaattctcaaaatacagtattagcctctcagcagcagcagcagcacttggaaacttgttagaaatgcaaattcacaagccccatccctgatctagcaatctctgttttaacaactccttcaagtgattctgaggcagcaggtctcaagctttaatgtgcatgcacatctcccagggaatcttaggaaaatacagattttaatttgtggtctggatattacacactgtcacagatgctaatactgctggtagcaaaaatataatttgaattacaagggtccataggacatctggatatttgcattttaaaaaattttccaagtgggaatgcagccaaggtgaaaacaactggtctagatagctttatggtacactgccaatagcccaagcaatctgaatgatctctgcttggttttctgtacctgaggttgtagagtcactgaagagcacatacttcttgttctctttaaagtgataatccggctggacatggtggctcatgcctgtgatcccagcactttgggaggctgaggcgggtggatcacttgaggtcaggagttcatgaccagcctggccaacatggtgaaaacctgtctctactgaaaatacaaaaattagctgggcgtggtggcacatgccggtaatctcagctacttgggaggctgaggcaggagaatcgcttgaacccgggaggtggaaattgcagtgagtcgagattgcaccactgcactctgcactccagcctgggtagcagagcaagactccgtctcaaaacaacaacaacaacaacaacaacaacaacgacaagaaccaaacaaataacaacaaaataaaacctaaagtgatgatcactgattttaagtggctccttagttgcctaagaatcccagttgtgatggttttatcccttattgtctagaactaatgttgaacaccctgctttttaacttcatcttgtttttctctacccccatcatcaatatttgcctgactcaccatctttcaaggtttacctcttcatactcagctaaaaattagctgatgagatgcacaaataattccagtgtatcaggagaggatcagcttcctcccttttaaggtaacatggatcctttcaccatctcctgatgccctgagaccaatgtcttgagagcatcacatcttgtttcatgcattctgactgggcatgctcatctattccagtgttcccaagaaacactcatgtattgatcactccgtggccaggccagatctctctctggcttgtcactgagtggacattttttttttgatttctcaaagtcacctcaaattcagtgtgcccagactagaactcatcttccctaccatgtctgcgtctcctcctgcattctctgtttcagtgataagtaacttggggggcatttttgattctccttccctcttttccaccccaaatggaacttgttgttaggatctgtggattctatcactcttgattccacctacttttcaccattttgcctctacttctctggtgcaggtcttcaccatctcttgcttaattgctgctacagtgtcctaactaatttccctgcctttagtctgtctgtccatctctaatccactttccatatggcagtgagaatgtttattcttgccacttcttagatctaaaactctttagtagctctccattgctctcagaattgagagtccttattatgacttaaaaattattaattatctggtgcttgctcaccttccaaggatcttcttttcaccttgaactggatgcattttccgtatgtaccattttctctgtaggttctaagcctttgaagaggtgatgcctctgcttggagtgtctttccattctcccatttgcctagttcttattctttttttatttgctaagacactacctctgaatagatgacttccttgaccctgcctctctcaagggtgagttacatgccctcttcttatccttagtgttaaaattaccacactgaccttcagttccctctttacttgtttatcttcctcagtagctccttaagaagggattatcttcttcactctgcccttagcatcaagcctgatgtctctattatagtctgtgctaaataattattaataaacaaaatacccagttagtgtaaggaaaggaacctgccatggtaaataagtgtgagagaggttttgaggtagtcgtataactgttagaaatacacaaatcacattatagatagtggcttctctgtttatcacagtgctcagtttcttgttccaggatatttagaaaaagtatacctaaaataagcggagaagtcattaggttgaatgacatattcccttctgccgaggtattataatataatttttaaagggcctcagttaacaattaaattctttatatccttgcagcagttctttttttctaggtttcatttccttccagaactagatgaggatttttgtctaactgatacaattccacgttctgagtccttgccttctctctctttcagtttctgggttgtatgtggtagattgcccagtctatacctaatcagcactaggttggagaagaataaactgccttcatgttgtggagctggcagtcttctctgttgagtgataaaccaatgccattctaaaagatctgcagacctgtgtgatctcttcttcgagggagctgtaagaactaactttgatggaaacaccagttttaaaagattgcagttcatttcctacatgcatatttgcctagggaaattttgtaacatcaactgaagtttactaaatgaacagcaaatgaataagtatacgggttgatgacaaacactccagcccaacatctctagggcctttgccaatgtttcactagaattttggaccctcaaggtcatcttagttttaccatgttctcctgatttgtgttgtatggggtcatcctctttagcaatctgcagagcataattttaatgctgtctcccaggtggagggttgatgatccctttatagaccacattctagcacaaattaatgtcactgtttcttctgtaggaggagcctggcacactgaataccagtggagtcttgctctctaggcttatcttgggagctagtatgcttattcttgtttctgtccctttccttatgcactgccacaaaggaattgctctagaatccatttcttcttcctcatctcctccgtttctttgaatcttattttgtaaagttcaagcttcatttcctgcaattagggaatagatcatggtctctaggtgctttgtcattctcaatactgtgtgccattcttttgaattacttcatgttcctttggagcagaggttgtatcttttactttatatggaaaagtatggcttagtgcagcgtgtaactcagactaaggcaatttaaatgctgtatttcatttgaaatgacacatggagctgtttttaccacatttctcactgtcttatctgaaaaccagattagcgcagggaagtcttggagctattaaaaccttctcctcatattttctctggctttcagaatgactatatagggccttttctttggtggggattacacctcactggctctcatgtaaccagtcaattttcctctcacttattatgggactgtgaaagaaagaattagaaggtgaaattataggattaatgttaaaaggaattagttagcttctttgttcctttaatttccagttacaagaaaagaattagatcaattacatttctatgggcttgatctcatgtaatagtagctattaccaacaaaaatataaccaaattggacttttaagaatgttcacagcagcattgtttataatggcaaaacattagtatcaacacaggtgtccaaccacaggaaaacagttagataaaatgtaattaaatccttatgataaaatgtgaccattaaagttgctgtttttgaagaatttttaatgtgtgaaaatgtgaaaatgtgctgatggtatcatcagcacctagtaccagtgcctggcatgtgaaaacagcttccaataaatacatatgtaatagctttatcataccaggaaaggtggctatagaaaataatagtaacctcgtactaaaatgaagagaacatcaacttcctctctgctagatggccactatctgcatcttttattctcttgagtattctggaatcagtaaaaatggtgttttcaaagaatcttatcagaaattcagctacatctttgcttggcaatctgaagtttttggaaagaacgtatttcaataataaagaatgacatagaaatttttacatggtaaatatttaaataaaatatgacattttaaatttaagtccagggttactgtttcagagctgaattcagacatctgaatgataagcggagatttcattgagaaaatctctactttatcattcctactggctttactatgtcatggagagctcaaaatgtcatcactgaattagttttctagctgacttcctcctggtggtgttttatatgttagtgacattgatttctggacttttctttttcccataggtcttacctcatttatttgaaatagaattgattaaaataacctatagaaataaaaagcaaaataaaacaatagagataaagatgaaaaatgtggtataatttttaaaaattaccattctaggtatatagtcataattatgaaatattattctggtctgaatgatacaaactgctcagcttttatgctttagaagatatcattattaataactaatttattagatttgaacattcaagagcaaagagatgttacaccaacgggttcccttgtctcctactttctagtttatgtaactgtaaatgagtaccctagattatcagttgctttttggggatatgttttgttatgataaaaagaagcagttcgatcatgacatttgcagttatctttcttgcagtgaccttctagaaatgactcttcaccttcctatctctttccctgtcttggttcatggtatactcattctttcaattgtgaaagtagaaagtcagctgactctttgattcttctgtctccctctgaaccactgacttatggcaatttccctttagcatgtgttccgtatctggaccttcatgttcagtctcactgtctctcccctggttcaagttctcagataaaaaccgtttgcctttagtcttcccaagcctttagtcttccccatttcaattcatctcctgtactatcataagataaatattgattttgctctttttgtttctgcttccagctttattaagatgtaaatgacaaataaatattgtgtatactgatggtataaacgtgatgttgtaatacatgtatacattgtgaaatgattaaaccaagcaaatcaatatattcatcatcttacatatgtataacttttttgtggtaagaacatttgagatctactcttttagcagtttttaagtgtccaatacattttattaattgcagtcaccatggtgtacaatagatccctagttctggagattttgctattttcttgcccaaaaattgttagtagctattaccaacaaaaatataaccaaattggtcttttaagaatgttcacagcagcattgtttataatggcaaaacattagtatcaacacaggtgtccaaccacaggaaaacagttagataaaatgtaattaaatccctatgataaaatgtgaccattaaagttgctgtttttgaagaatttttaatgtgtgaaaatgtggaatgtagcagagcctaataccatataaatacaaaatacaagaaacatttatgttgttttttgtatttttttgagacagagtcttgctctgttgcccaggctggagtgcagtggcacgatttcggctcactgcaacctctgcctcccgggttcaagcgattctcctacctcggcctcccgagtagctgggactacaggcatgtgccaccacgcccagctaattttttaaaatatttttagtagagatgggtttcaccatgttggccaggctggtcttgaactcctgacttcaggtgatccgcccgcctcggcctcccaaagtgctggaattacaggtgtgagccaccgcgcccggccaagaaatatttatgtatatatgaatgttagcagtggttatttctgagtggctcaataacagcagatttttctttttgcctacacttttcaatttttctacaataaattgcattgtttttataatcagaaaaacttcctctaatgattggtatctgtaagaaagcttgtaagttatttagtttagttggtcttaatatatttttggatcatgggcctctttgaggatctgacaaatgacatggaacttctctcagaaaaatgaacatctgcccatagacacaaaatatggcatagaacttcagtaggattttgggcctcagatcaaagagctttttgatagtaagcacaatgctctcatttaagagatgatggtggacccagaggatctgcctgctctcccacaggaggctgggagcagaggcaaaactaattcttagtactttaagcttttgccttgaaactaggctgtccaggagacttgagatcactttgcaatgcccttcattatgtgctactgaggtaccttctgtaagttgctaagcctgtgaggtagccgtccacacccgaagagggtcctccctatggtggttactaatgttattctttgtagtagtgccaaagcttttccttttggtaaagataagcttttattggagagacctaggggagtggcttctaagtcagtggtgggtcctagaagtaagcaaataaaatgtgcgcctcccattactgaattttgtatctattactttcttaaacatttcctctcagatttgatgattttgttgtaaacaggcatgatgaaggctttttttcttgagaatgtttgttttcttccatcatctggcagttttccttatatgaccttgactatggtggtaacaggaatgaggcatctgtctgctctagaatttttcattgtgcttggtgctgtagcggttctctctacctggtgcctgcacagcctgcatgattagggcttggaaaggtctcatttcctctggttttaagtgattttgttctttcatagccttaagttagctagtaagtgagggaaaagtaccactaccagcaccccagagccagcctttgactgggaatgaacgtggaagagtgccctttctttgtcagaaactcctacagcgccctgataaatcttgccacagacagcagattttacaaataaaggagaagtgttttctttggtgcaaaaaagacagcaaacacagatctggaaacagctgtctgatactttttttgcaagttgttaagccctctacagtctaatctctgtggagagccctgaatcaaaacagaggattgaatccctgaattgagcagaggaattgtggaaaaggtaaggaaatgaacttttttgatgcctccaagtaccagcactggccaaggtgctttcatagatgtaatattgaatcctaggaaaaccctgtgaagtaggtggtggtggtcttatttttacaggtgaggaaactgaagcccaaagcgtattttgctgaagtatacagttagagacaaaactgagtatgtctgcttccagtcaagctctttctcatctataacaaataggttgtatgacagcacatggttttgaagtgctctaattatcttttatgtgtatgtgtttcaaatatttttatttatatactatgatctcattaataaaattagaaaatacagaaagatataaacacacacacaaccctcacatgaaacagttctactccaaccacagccgcttgtagaccctgatagataataactggccctgatgaagatttcctctcctctctcatctctttgcttatatgctgttgtatattttccaatcctttcctcccaatcatatttctaatgtaaatgtaacggaaacacacggacagttttacgtccttattctatatgtattggcgataactttttgcatagcgcttcattctgcacatagtttagtgttcccccactgtcatcttcataagatctgcctgatgagaggaaaagcagaaagagcaccatagtccctgaacaatctgggcagaaacacatgggtttgggataatacacgtgcacttttcttcactcctctacatctgctcaagatgaaaatggttgggacattatcattttgtccatagcacaggagaacatagttaagtcatttggttgagcctggaatgcaagagaaaatgtgtctactgacattctatttccacttcaccgatagccctgagaagacagaaagatgggtataacttgggtgtcttcctcctgctctcttagaaataaactcttgaaacttattgactagattgtatatccacctagaattgggccagagtgaagactaatgcctacagtatgcacacccatgtttgggtgctgtcagagctcaggaaacagaagcctggagattgcctagtctcctgccctttgcagattaccagcaagcatcctctcaggcacagactgcccaagggtgaagcagcagcagcctggagaagctgccaatggtaataggatgccaagaaagaaaagtgagcaaattagaaagatgcccaccagcacttatctatttggaacccaatcttttctttctctacaaaaattttagattgccagactcttgaacttcaaggtttccttctttataaaaattatattaaaaaagtactctcattccactatctatgtctctccagagcctgctttcatggggctttccaatatcctgctgtggggaagcaaactgtttgcacttcttgcaagagatttaacttatttaatcagtttccctctctctctttctcccttgcatttactgatgataagattgtgttcagggtagaaatttggctgcctgtttgagtgacaacagcggacccagcccttgtaaatgtctgctccttcttcccgctgcatctagtttcctgccttctgccaggtctcagcaagccctgtgaggcaaagcaccttcttccttctactgtggacagctgcttctcccaagctgtctgccatctcaggagggaccaacgctctttgcagttctgtagcttctgtcctgttcttgtgaacttatgttcactaatgtaaatggggctttatgtctttattgactttgtagtgaatacaattgtcagagaggctgcttcaaagaatcaccttgctctcctctgccctgactcggggctcagcttggcaggaggtgtgatgtctcagagcaagtacagcattttttgaaggagcaaggtgttaatggcaggtgactctggccccttttatgtgcttgagctgttttgccaggtacagagtgggagtggaacagaaaaagggttttttctagtctagggtcccaccagctaaggcctcctgattgagccatctgtaatcccagggtggaccttgaggcagcctataaatcattctctgctctgccactgtgtcaggttaaggcttggaattaaggttccaagagaggtaaaaggtaaaaccaagagctcatcagacagcctgaccacaaatttccctctccattgtgctcctgtgggtgaggtctcctagccaaatgactttccttatcttgaggaccaggcccagtatctgcttatccctgaggagtgggttttggttccctcacagcctgtggaattattcaaacaagccagtcacatcctcttgtggggaccagggctaccttgcccttctgttacttcaaaaccagcctcacataggccctgcctgttcacctttcctgagtgtggcccctgtgtggcctgtgtggggtgcattgtcctcccctgggctgtgagtagatatgactagcgaactgctattaatctcctctgttaaggttgagtgtcatgtggttggccatccccatatttctagggtgggaactcctccctcaccaatggggtaaagaagacactgcattcagcttttctagcctcctagcatgtataactatatttccacttttcaaccacttgccctctctcgtgtaatacactacaaagagaaggaaacatgcctgtaattttcatcatgatatccttggtgtccagcacagtgttccctggcacttgataaatatctgttggataaatgaatgagtgaattccaagggttctttctgagtaaagattccactaaatagtttctcctctcacttgcaaaatgttgtcactccataatcagggatggaatgaggggtgtgagcagggtgtgcacgtcacctctaacttctccaggttcttccaacctcagaggtgtcccaagcaagccaaagagaataacagatccttaggatgtatcccacacccccagttcagtgccatctcagtgttagattgatgtacttttcttgagataaacattgacagatgtcgctgaatttggcaaccaactgtacttcacatcttctgagacattctagtccacttacccagtacatgtgaaaggactttagtgcctccctcttttgttctctgggctatcttctccaattctgatttgttgatgtagatggctgttaccagcaacaatgagagcgtggggcctggggaggcagagagctttcattctagtgtttttgtgattgttttggctatagctaggccaaggtactgtcctattctgtttgtattgcagtcaaattaatcaacaggcatttttttctcagccatcttcaagtcgtgtcaggaaaaatttggcctacatgaggtttaggaaactatcttttatttccctttattttcatgaacatttgagcttgaggagaatgtgagcatttttcagatcattgggtcttatagtttcaggcttcatattttgtgcattcccacttctaaagctttgttttcatatatttgcccattcctccaatctaagtctcaccatttaaaaagttaagttcacatctggtttctggggaattgttgcctcatttatctttttgtctccttttcagaaatcccttttagtttattatttattttattatttttattttagtttattattttttcacatgtagtgtcactggtatttattatttttagtttattattttttcacatgtagtgatattatttttatttagtttattattttttcacatgtagtgtcactggtattaattttactaatttttgcttctcaaagccaaggactttgaggaattttcttttctttccagggtgccttatacagtgctctgctcataataggtgtttatttttcataataggttttcattgcttgattttttgatagcaggaaccaggtaggtatgcctctataagggtgaatgttgttcataggagacaaaataacaaaactggtgtcagtttgtttgagcttacattaaacgggttcacaaggcctcctgagctctgtgtattgaagcaacagaaaccatgaagcattttattgcaagagcaatcaggcaacttcccagatgttgctaaactctgctttaactgttgtgtagagctagttttaactgcatctcccactgctactggagacaatgattctagagatgttactaattgtcacttgttctttgcctagatttcttctctgctccttgtggcgtcacccagccgctagacgggcaatggattagaatttacatggaggctgtggtcacggttgtctcaggtgttaaggaacaaagaaaaagaggtgcagaaagaataaatcaaatcattattttaaaatgtcttagtttccaaccaggcaatggaatttaagggagattccctgacggttaccctaagacatctgctttggagcccttagcagaactctctctgtgggatgattggtcctaagcctcattaacagaggctttgcggctccattggaggttggtgcagcacaggtgggcgttagcacagaggtttataggaccaaacccacttcagcaaccagcactaattggctccccagggaagtcccatgagaagctgtcaatcgtgaagactgagtttttgtttataatatgtagtgatttctcctttgctgctctttttcctcccctatccaaactgcctttccttcttgcacaaataggtggtggttcccaaagtacagataattagaaagttgaggcaaaccttactttgattccaactgcatttttctccactctctattctccctaacccttcccctatccccacccttagtgtgaaacaataccctgtcatatgggaggaaccctcgctgaggttgtgctgacaaagctagaaagtagtgttgaaaaataaatgtacatcatcagtgcattttatgaagtgatttctagtttctgtaatgtgacttcaattatgctgaaaatggagatcttagtctcatcacgtacttttgttaaatcattgtattttaaggttaagtcacagggcaggaaacaccttctctgcaggatattgggtgtaaaataaagagaggctttctgtgtcctgggaatgttctgctaagaagacagtgatgataatagttaccactgaataagtactgacatgtgaggaactaccaggatccctgctttacaggaagaagccgaggctcagaagtacacttgtctaaggtcccagaacaagtgtaagtgtcaggatttgaacttaagtttgcctgattccaaaagtttctgttcttaaaagctgtgttttgctcatgttttgatttatgtttgcccaaggtcttttggtccaactacaaaaataatttaaattagttatcagaccaagcattctttccagtgtttgagggacgggagcaactcaggtgtagttgactaaccattctacattggtgttatttcgtggggtcaatttcagggccgtaattcagtcatagttattgccaaatccaggtgatagtaggctttgtgggtggtgagggtagattagaaggactttagcttgcttataatctcccctgttctttcttacgctgaggtagaaggttggtgaagagactagaaagacttgggggtaagttctcaagtattacacaaactgaaatttggttctgtcaactgcctagttatgggacatgattagtgccaacaggtcacagggggatttcacttcctctggtcaatatgatgcaggatacagggttgggggatgttcaaggaaataacaaactgcagaaacatcatttttatctgtttcatgcacacttgtggcccaggagattggtaatttcttctttctgataatacttaattgaagagacttttatttttgactagtacttacaggaggacttaagcccgatcaatgcaaattgatttttttaaaaaatcattaaaatttaaaccttgggcattatctttaggttgtaagtgctaaactcagcccacctctttctttcattatgagcaaaagtaatcaaagaccatcagtgctaattaattcagataagccaaaaacatacatattcttattttaaatgaaagaaatgttagtgttgtgattgtttttatattattttaattaaaagttaaatggaatagaaaggtaccaatttaattacatattgaaattcctctaaagccttctcagaagtacttccttttagttgcagattacaaaaagagatgtagggggaagatataagggagaaggagaatcagttcaaattgttttcaggtctgatttggcgtaggaaaattgattctgaaaatctaagtttggaaaattaactaaagcaactcttctcaaacataacctggtcagtgattaccatccaaacattcaaggttgtttctaatttgatcaagaaatggtatggaacaatgcacatgtaatctaaaccatattttagctgtaatttttaccttctcctattgtatcctatgttcaataaaataaatatctctagcaaagaattcaatataataatgtttccagtcttccttcatttttatgtcttcccatagggtagacaaaattccagtaaacaataaaatgatcaaaatatgagaaaaataaggagaatgagagacagtctctgggtggcatataaacaggatggccatcctctgactcacaggctgtcttgtaaggttggcaatgactttgaaattttatcaagtctatctcttttccttttggcaagactattcttatacctttcccagtagatgttaatctatcctgtttttaaatgaaacttctagtacagaagacacatggtcccttaggaactcattgtgaaattagagggttttcagagaaggactctgttgtttattttgattgttcatcttctccatagggatgatcaactttatataaacagcgctgcatccatgtaaagtcattttacatggcacttgagcagattgacagatatttagagaacatgaccgccttagggaacaattagttcagtcccttaattgtgactggttggtcttctctcttccagattgagattataagtttcttttattataaattcatgttgtgttgttgacttatattcactttagaccttcatattttttgcctactctttgcattgctagtattcccctgctctgtgttaaaatatgctggttctgtcagttaatatccaaaatatgtgatttttttaaaaaataaaaagtgtgacagggtctatgatgtataggacataggattagcatggatatgactcagtatcctgggctccaaccatgattctgtcacagctactggtatgactttgggcgggtaatttactgagctcagaggcctctgagcctcagtttatcactatcagatgtgtggccagattcagagcagctttttccaatgggttttccatgggatgttaacagatataacatgaaaaatggtcccatttaaaaataggtggtggtggttgggaggggatggggaggcaaagattaaatgaacctaaatagatttctttgctgaagcatgtgagtctttcacatattttggcttaaaaaaaaaagaattgtaaatcttcagatctttaagaggcgtttcctgaaagtatacaactatagttcctttttttttctctttttaatgctttagtgccgctaacccttgaccaggctcatctgcaaagcagaagtagccactttccttggtgcccatcccagaaatacagtaaaacacccaggaggtcactcagggctcttgactgtggatgagtttatgcattccacgtgtacctttctgcatcatgaactctttgagggcaggagcctttccttatttgccttgtgtaaagagggtctattcctgtgcttatacctggaagatgtgtagaatgagtcaaactgtccataagtggaaggcactgccttgaaagttttcagcttccctatcacagaaaatgttattatagagtgaatttttgaaatgagtggaaactgtagtcaagatgatatctatgatcaggaatctgtgagtttctaaggttataaagataacataagaataaaattactcatagataaccacaggtaggttaaaaaagggcagagtacagctttgcaggtggttcttactggcttctttctttggtctcgataaatttgcctattaccttgattctgtctgataatgtgaaattattaattggagaagtttgtccagattaccaatatatgaggaatggacaaaatgccacgacattttcttcatcgttcaccttgtacaatgccactgtgtacatacaaattcaattcattaaatttatgatgagtttgtttttctactttgctgttccattacctgttgtatttcttataagcttctggaaagcataaaatatgtcttatatacatttatttctccattgatacctagtgttttataattataggaagaactcaataaatgttgaaaaataaaaagatgactatagtggctcagacattttttccaatttagcatctgaagatagagatagtaaatatgatgagcttatatgtagcagaaattaatgttttgaaagtaggggaaaaaaccctatcatttcactaccaaagaatagccattgttaagacttcaggttatttctctctagacatatttcctgcaaagataatttttatgtatagttgtaatcatattgtatatataattttgtgtcctgatttttttcatttgaaactatgttatagaaagtgtttatgatagttatatttgctcttttgtatataggaaatatttttacaataaaatttttaaaatcatagaagtcttaagtaatatagttttcactaacagaatttttaattgtttctgcatggtttccttaaacatttattattttattattatgtttcttatgaggttttgccttcattatttatttatttatatgcaagagctggagtagacatttttaaacaggaatatttttatatttttccttttgaatattttcaaagcatcaaacacttattggcaaactgcttttcaaaagtatgtgtcaatatttgctatatcaaacaatgtatgaacattccaaattcattgcaagttcaccagcaaagaacattttttttactttttaaaatattgactgattttaatgggaaaatgctttattattttgtttaatttctgagggtattttttggtcttattactgaggtcaaatcttttctcatacttgtcatttttgttcttttgtgaatggtccatttatgtctttctatttatttttcttattgaattgtatgaatgcttcattccataaaacatgctatttcctgcagggactgtatattcacacaccactgcattgctgatgcccaaggatagtgtatgaaacagggtaaaatcaccatcggcaggcagctggagtagcttgttctgtggactgttttgcaatgcaataatgaggagggagctgagttactaaacagtcccctctttctgttagttcattattgcaaaagcaaggcctggcgagtgaggtgtgtgtggcaggcttcattcttccctttgtctcaactattattagataggtccagaaattgctggtacgttggggctgtgggcacatttggtttatgttgctttcctagatgttaagtgtcgcaacagctcgctatggtttgctcctcacttgagcaaattgataacagcttgtctgtgactccttaagaataatgagaatcaacctcattttaggagaggggacagattgtgtctgtacttggcatccttctgcagacatccttctgcagctgggattgcttgagacacttcacagagttgaggactcatattgacagagaaatgtccattttgtctgaggagctgctgaatctgtcagcatctactggcagaagtgctttctctagcatgacttcacctctcaaatccctggatgtaacaaaagtcaatataagatctctgcagtctatttcagtcctttgtcattttatcagataactaaatgctaaatgccttcagatacatcataagctaagggctcctttgaaaacaggacagacactttacaaactacatcaaagcatgcagatagttttatttttaatactttttttgtcttgcatgaaatacttgaaaatagttcagatatcgccgctgccacaaaaattgtcctatagcaaagaaaataatagctcttttaccttaatagcgaaagttttgtgtagaaatgatttgaggatagaagaggtttttccaaatatgattttgttgtgttttcttttttctctttctctctttcttttcttttctttctttctttctttctttctttctttctctttctttctttcattcattctttctttctttctttttctttctttgactctataataacttcttattacatgcagaagtaaatcttaattctttttggccatcttttctgtgtgaattttattttattttaaaaatagctttattgagatatccttgacatatacaaattgtatatatttaaagtgtacaacttgatgttttattctatgtatttattatgaaatgattacattccagctaattaacatatctatcacttctacatagttaccatgtgggtgcatgtgtgtatgtgtgtgtagatatacgtatgtgaaattcaacatgaattttggattctataatattgttaaacactttagaaataaactttcttgtctctacctcagtatgtttgcacatacattcttcccaagaagcaaacccattcttgtttgtcagtggaggctttacttctttcgacatttgcctcctcaattttcttcttcagttctgtctcctccacatgatgtcagctcacatattcaaaatatgttgccttacaaatcctcttgggtatgtctatgtattatttccttaaggtaggactaattttacattctttatgttttccagtgtgttgactagaaattttttttatgcaatgtgtttctaataaatgcagttgtttgattctctttcgttctaaaacattcatgagattcaaattgtgatcatatttccaggtaattgaaggacacatgagtttagggttattgatttcatattttaaacaaaatcacaaattaaggatttataaaataaaatagattgtgattatattttttgtttgtcccttaatctttaaataaataagtggtttcacaaaattttcttttaaagatattttaaaacctctgatgaggccatgcttaaaaataattaaacccattataaagtagtggtactgatggtgatgtttgaagtaatatctttgagtttggggattatgtgattttggaactctgcatgtagaccaacttctggcaacagtttggaatagagaggacaactttggccacctggagcaacagcaaaatctgatggtgataactctcaagagagtccatataaggcttagtaaagatacatggaggaattgtatgcatctgatttttatttgtaaaattaaattctgagattccaaatgcaatactgaaattgtgagctctttctttgacaacaaatgtgtccagggagatgatgagcttgttaaacatcaaggttataattcaaatgacaccatcaagttgaagaaatgtaaaaagatatacagacacaatgtttgaggaatcatttgccagtgttacattggaaaatatgttgcatagtgttttcttaagcttattcctttgttgttgttgttgttgttgttgtggagatagagtctcactatgtttcccaggctggtctcaaactcctggagctaagtgatcttcccaccttggattaaaggtgtgagccactgcacctggccatacttacttttgagtagttggtgataatgatgatgttgatagagagtaattaagtatgaatgagttatttacttcttataacaatatactatgttatacttatgtccatttataaatgggaaaattgaggctcatagagaagatgtgagttgccctaggttatatagctagtaagctgcagttaggatttgaacccacttctcactgagtccaaagaccaatattttgagatactgaaaagttttttaggatataataaatgagtcatgaatagttactgtgacatataaaagagggattccttgtgtattctgagaagttccaatgagttagtagtgttggtcaagtcgcctcttggtataatgttaacatttctggttaaaccctgaactctgcagccatcaagaaattatagcccaagaacaaagggatcataggtagtctcccacatagtgatgtctgtcctttgacaaacatcagtgtcttcactttgacaatggtacgttttcttttgcttatcatccctggttaaatctttttctaatctcagctgaatgggttgaacaatgatagtcattttcatcccttgatatgaagagatggttactaaactcaaagcaagaaaaagtgtaaatatgacacttctgagccggggaagcaaagtgtaaactgaggcagcagtattcttctttatgaagtatttaagccatgatgctatttttcagtgtatttgctatgagaatgagagtacttgctaatgaacactctcattgtatattaatagctgtattaattgagcatttattatatgccaggtacagcacttagggctaactgcatgctttctcatttaatttttacaatgaccttatgatgtatataccattaatattctcatgtcatagattagcaacctgaggcacagaaagggtaaatcactttctaagattacacattttattactggcttaatcagatgatgtctaagtatcatgatgacatagtctgcgctattaacaactctctcctgctttttgcactttaagcattctacatgatttttacacacgattttgctcatggtttacctagatgattttgaaactcaatcaagttatggctacaggattatatgaagggacaccataaaaaccctgtctattaattgctgttggctttgctttagcagaagacacattggattgggcatcagggcaaatggattctggcaaaagatatgctcttggaaccacttctttcagctattaagtggaatgaataatgcttcacttgcttaaaggcaggggctggacaagatagcatctttgactgaatatgaacagaacaacgtatttctaattgtgttctttaggggccagggttgctggcataagcatgaattgagcatcttaaaaggtgtcatgaaaccatgaaggaaagaaatctcttgcctcttggtataatgtgaacatctctgattgaaccctggactctgcagccaacaagggactacagcccaagaacaaagggatcataagtagtctcccacatagcaatgcctctcctttgagaaacatcagtgtcttcactttgacagtgctacattatcttttggttatcatccctagctaaaaataattttagaagggcatagaaagaagaggtatatctaagatactctcttctaagtaccaaggttgattgatgattcttttcagaaacaagaaactttcttaaagtataatatgttgatggctttgttgagttagcaatttatcacaccacatagttctgtgggtaatttatcattgaatcaggttccctttactctgtcccaatattataggttaatctgggacatgtagtttctgaaataccgacagtcccattttgaattattattttagaagctgtgaagacatttagctccttttgatttcatactcttgactttagtactcattgtagacatgagaagtatgtggcattgtgtgagcatctgtaaagattgtaaatgatattaattaagttggctgtgctttttctcctcacaatggattcttttgttaggctggtaataatcgcgtttttggtaaaaacacctcatggaatttttttcctttctcataaaatagctgtttactgtaaaattgagatagcctctcaagtctggaacacctttcaattcatcaaaaagggacaacctaatattccaaagaagactcaatccttttaacacacatacattttagggccagtcaagagaagtggcctgttctgtaggaaaacatttcttggcacattattattttaagtgattgcaggagaccacagagggagagaaaagagacaacaacaacttctagcatgcctgggggatgacttgctctttcatatttgtggaaccctatgtcaagagagaaaacatctaaaaataaaaacgcatttactcagattctctagggcaaggtgcaaagagcctgtgctgtaggagctcagatcaaaaattaaatggttgaaacctgcagagcaactgccgtcagcagaaccgtgggctccttctggttgattttgtgccattcagttagtttccataaattggccttgggtactgatgttctttggtcttttttgtgctgtccataactaatagtgaccgttgctggtaaattgtttcttcagtccagtgattattggcctttcaaagcattgacttcctccaccaatgtatacagtcaccaaatgggatctggtttgttcaacattctagtcaagttccaagtggtaggaatcaaaattccactctagtttatgtgtattattcctatagctcttccctcgagatgtggcatgggatggaaaatggagcctatgtgtggtataggcactacttaaaatttatcaatagagagggatccatgaggaggaggaaacaagccaaagagattgggcaggctaattttcttctagacagttcctgctctcttggattttactccaattccccactctttccataggagtaaaagtcttaaaacttgaactaatgttgaattttaatcctgaatggtgtagcatccttcatttctatccgtctcattatcagcccatacccctgccattgccactaccatattttcaaatgtctttcaactctccaaaacctactgaccctagtttatcatgcatttgaaaggctccccactttttgtagaacttcaggtattttaaaacatatttagaaagactctaaataaactggagtgagtctatagctaatgtttgaccaaaaaaaaaaaaaaaagtaaaaaagtgtgctgtgaaattttgaatattaattgtgccaattggaatggcatttttaaaaagaaactatttcatccataaatgataaatatatatttctttgtttaaaaagtacattaatgcaaaattctccacccccatgtatttttagcttacatatccatctaacctaaatacagtcatgcatcacttaatgagaggcatacaatctgagaaatatatcattaggcaattttgtcattgtgcaaacattgtagagtgtacttagatacacctgggtggtatagcttagtatacacctaggttatatggtatattctattgctcctagactacaaacctgtacagcttgctactgcactgaacactgtgggcaattgtaacacaatggcaagcatttttgtatctaagcatatgtaaacacagaaaaagcacagtaaaaatacaaaataaaagaggaaaaaaagtgacctctgtataggacacttaccatgaatgaagcttgcaggagtagaagctgctctgagtgagtgagtggtgaatgaatataaaggcccagaacattactatacactactatagactttataaacactgtacacttaacggtacactaaatttacaaaaatatcttttttaccattcggcccagcaatcctattactgagtatatacccaaaggaatataaatcattctattatatcataaagacacaggtagtcatatgttcattgtagcactattcataatagcaaagatatggaatcaacctaaatgcccatcgataatagtagattggataaataaaaagtggtacatatacaccatggaatactatgcagccatacaaaagaatgagatcatgtcctttgcgggaatatagatggagctggaagccattatccttaacaaactaatgcagaaacggaaaaccaaatactgcatgttctcacttacaagtgggagctaaatgatgagaacacatggactcatagaggagaacaacaaacactggggccgactagaagatggacagtgggaagggggagaggatcaggaaaataaccagcaggtaccaggcttaatgcctggtgatgaaataatctgtacaccaaacccccatgacatgagtctacttatataacaaacctgcacatgtacccctaaacttaaaagttaagaaaatttctttcttcaataaaaaattaatagctaatttttatctttaacaattttgactcctgtaataacactacttaaaacgtaaagcaccatatagctgtacaaaaatatttcctttctctttcctttctctgtatccttattatataagcttcttattaaaaaatgtctagttatctcttttattttttgaacttttttcttaacaactaagatacaaatacacatattagtctaggcctacatagagtcagtatcaacaatatcactgtctttcaccttcataccctgtcttactgaagattttcaggggcaataacatgcaaggagctgccatcgtctctgatgaccatgccttcttatggaatacctcttgatatgcctacctgaggctgttttacagttaactatttttttaataagtagaaggaccacactctaaagtaatgataaaaagtatagtaaacacataaattagtaaccattatttgttattgttatcatgtattatgtagtacacataattgtgtgtgctctaatttatatgaatgacagcacagtaggttttttatgccaacattgctacaaacatataagtactgctttccattatgacattactatgcctatggtatattaataactaggctataggaatttttcagcttcgttataatctaatgggaccactgtagtatgtggtccattgttgacctaaatgtcattatatggcacatgattatacttgaaaataatcaaagttatcagatagagaaggcttagggatgcagaaccatctttacaagtttttgctgctttgagacaaatccaaccccgactattaccagcttagagacacctcctagctgcctctagagatgtatatcatctttgatcagggactggggacctaaaacaggaacaatagcatagcatgcttttatgtgcaatgaattttcaaatattaaaaaaaaccttcaatattgttgttatattatctgcacagtattaggaaaaatgagtaataacttataagtgaaaaaatacctatgctgcaaaaaactcttttaatgttgactccagtttcagcagaataaatttgtctgatgatagccccagtgtctacagaaaatatacattttctattactggggttacagtgtatgtagaagcactgtgagaaaccttgacattttggcagaaaaggatttttaacaataaaattcaagaaaaggtcatattagtagaaattttggtagtcattttaaatgtctcccacattatatggcatcataaatgcatttaatatcagattgaattatggctgtaatctttagccttagtagtctgaacatcatttcatacctagcttaatatcctggaatgttatgtgtggtttctgctttatttaaaatagaggagtgacaagggtgatgaatacattttatttctgttttctcatcccattttctattgcaaatgaattttttttcagaagtaggtatgcctacctgtatctttgcaaaatgcattttcagaaaataggtttggaatattcatttaaatcctatttcttgtgacccaatgtaaactcactgctgttaaatctaaagtgtgtgagttcttacagctgagcagtaattctactgacattttaatgtcatgtcctctccttagcagcctgtttgcatattgcatgcaggctacatgttaggattttttaaaacatgaggtgtcttggaaaatgattttgacacaacttgtcctcttggaccaactgtattttataaacattttaatgctttactcttgaatgatccatttcactaagagtcagaaaactgagtttctgtcatgccatggtgacatgatgctgacattgctgagctagttacttattccttttacctaaatgtttaatagaacacacccagccctgtgtgggcatgagagggaaatgggcccagaagttgcagtggttgcattcacaagccattaagctgtggtcagtttctccctaaagcattgtacctcccttagacaacttcctctttggggagttgcaatatctagaaacttcagaggaaggggtccagctgcagggatatggttaaaagttttttcagaggagccactttgcatggcagtgggccatttcctgctatcactcaggcccagcctacccacaagttacagtctttggcaagaaacagaaggaaacagtggtggctcttggagccacatgctcaatttttgatggtgctctttgcgcagtgaatgccagctgctcctcaatcaggtatgctgctgttgttctgagagtgattaggaacaaaagggatgatgcagatgtgtcaggctatgggaagtgcaaatgtatatttttggagcactgaatgtaaagagatttagaagtttcctgttggaaagcaggctatcgaagcaggcaggcaaaatgattttgacaccaataccaaccaagggcaagaagtggaagcttggaaatatacttgtttgggaataagaaattgataagacaaatatactttttaaaaagaaagataagagaggtcatgaaagaattgtgaaggtccagtctgtcctatttcctttgctaccacctgagtctgttaccatggtctcactcttgcatgaaagcagtcatctcctacctaagccccttctgttcatcttgctccttggaggctggcctccacatccttgaaaatacaagtctgattttgcctctcctctgcccaaacctgccaacagcttcccaactcatgaggagtgagatcaaatgtcttgccatggctgacatggcattcttgggcctggccctgaccttctctgtccttatcttgcaccactcttactgtcactcgctcccttcaggtccctctgtttccttgctgctcttttatatgccatccctcctcagggcctttccaccttcatttctgattagaatattcttcccccagatatccgtattacacactttctcactccattatcatctgttcaaatagcacttaaaaagagaggttctgtggccatgctatctaaaatagcacactcacatgcacccatgactttctctccacttaccctatcttcttcacagcacgtagcaccacctgtcatattctatcaagttgaaccatatgaaattgcttttgggtggatcaagaacagctgaatattggccatttcatttggttcaaactaaaatatatttattaatttgtttattatttgtatttcttctatactatgattgaaaccctgtgggtcaaaggttttgttttgtttttggcaacatctccaatgtctagagcacagcaggaacttagacaagttgtattgaattaatggaaaggaagaagaaaagccatataacttgttgacagtaagcagtgaacacttatatgaaaaatgatctctctccctttctctgtctctgtcttgtgtgtgtgtgtgagagagagggagaggagagagaggaagcactagaggactctagaaaaaggtgatgggatgggcttcagagggaatccagaaaattaaaggatttatttggatccatgtaaagttcagtgtaatgtttctagttgtagctaggggctatgtatgcacctataattattatatatttttttccatgtggttttctgaaactgggaccaagtgggatcaaacaagctttggataatataattgtgaactgaaaaagtttcataattggtaaattacaaggattcagcttgccaattgtgctgtaagttgatttttactagagaaaataagttactttttactaacagttctagaaacatggctaataatcttactatcatccctgctacggatgcttagaaatactgcatgtctaatcttgaaaggaaataaaatcattactatgggtcagaagtaaaggttgaattgaaaactccagggataaacacttgaattgatactgtggctgcctttgggacagtattattagtctcactaacaaagggcttgagatatgaaatggaaaattgaggttctgtgggttggaacagagatcttcagtacaaagttgtgaccttggaatggaaaggactgaaaaaaaatcatcagaacagaagagacaaggaagctgtgtcttagaaaaagaatgtctccttcaaaaacacatctctatggatttgtacctcatttaggtttgggaattgaatttgtactacttgtgtagtatggaaaaatcacaacttgaaaaattaactacagagagcccagattactgatacttctaaagcacctggcagaatctgttacaaacttcttaggagaaagataccattcaaccaagtttcacaagattcctaaacataaatatcttctaaagattaactcacaacctcaaactataaaacataagaacaaaatcccccacaagtgagagttagcaaacacaaagagcaggattagaataagacctaaaagtgatggaactatcacatagactatgaaaaatgaatattgaaaatgatagagacataaatgaattataaatataagaaaaaataaggttaaaaaaagaacacactttataaaggtgaaaactaaagtaattgaaattaataatttatcataggttaaacaaattagatatagctggagagaaaattagtagactgtaatataatttgaagaaatcaaccagaaggcactgaaaagaaaatgatagaagatatgaaaaagaagttaagagacatgttggagagcataagattcaatatatgtttcataggccttctagaaggagagcacaggaagatttgggaagaggcagtatctgactataatgcaattaaattaataatttaaattaaaagacaacaaaaagaatcccacatggatttgaaattaaatcaacacacgtctaaacaactcatgagtcaagcaaaaaaataatgaaaattagaaaatatttaaaactgaatgttaatattaattaaattcatccattaaatattgtatgagaagcaatgaaagttatagttagaaagttatagctttaaatgcctatataagaaaatgaaaaaaggtacaaattaaaaaaaattaacttttaatttttttggctacatagtagatgtatatatttatggggtacatgagatattttgtacaggcatggggtacaggcatgcaatgtatcataatcacatggggtgtaaatggggtgtctgtcacctcaagcatttattttttgtgttacaaacaatccaattatactcttttagttatttaaaactgtacaattgaattatttttgactatagtcaccctgttgggctagcaaaccttaggtcttattcattctttctattttttttgtactcattaaccatccccacttccctccctcctccactacccttacaagcctatggtaaccatccctttaccatctatctccatgagttcaattgttttaatttttagctcccacaaataagtgaaaacatgcaaagtttgtctttctgtgtctggcttatttaacttaacacaatgacctctagttccatccacactgttgtaaataacagaatctcattctttttaatggtttaataatactccattttgtatatgtaacccgttttctttatccattaatctgctaatggattgctaccaattcctggctattgtgactagtgctacaataaacacgggagtgtagatatctctttgatatactgatttcctttcttttgggtatatacctaggagtgggattgctgggtcatatggtagtgctatttttaattttttgaggaacctccaaactgttctccacagtggttgtactaatttacattcccaccaacagcatacaagggttccattttcttcacatcctcgccagcatttgttgttgcctgtcttttggataaaagccattttaatgagagtgagatgatatctcattgtagttttgatatgcatttctcaatgatgttgagcaccttttcatatatctgttttccatttgtatgtcttcttttgagaattttttactcaactctttcacccatttttaaattagattattagatttaatagtgttgtttgtgctccttatatgttctggttattaatcccttatcagatggatagtttgcaaatattttctcccattctgtgggttttctctttgctttgttgactgtttcctttactgtgcagaagctttttaacttgatgtgatctcatttgtccacttctgttttggttgcctgtgcttgtggagcattactcaagaaatttttgcccagtccagtgtcctggagagtttccccaatgttttctttcagtagtttcatagtttgaggtcttagatttaagtctttcatccattttggttttgtatatggtgagagatagggattgggtttcactcttttgcatatggatatccagtttttccagcaccatttatagaagaaatcatcctttccctaatgtatgttcttggcattgttgttgaaaatgagttccctgtagatgtacggatttatttctaggttctgtattctattccactggtctatgtgtctgcctttatgccaataccatgctgtttttgttactatagctctatagtataatttggaagtcaggtaatgtgattcctccagttttgttccttttgattaggatagatttggctattctgggcattttgtgattccatataaattttaggattttttttctatttctgtaaagaatgtcatcagtattttgatagggagtgcattgaatctgtagattgctttggatagtatggacattttaacaatattcattcttccagtccatgaacatgggatatcgttccatctttttgtgtcctcttcaatttcttgcaccagtgttttatagttttcattgtagaaatctttcacttttttggttaatttctaggtattttatttaatttgtagctatcataaatggtactactttcttgatttctttttcagattgttcactcttggcatttagaaatgctactaatttttctatattgattttgtatcctgtaaatttactgaatttgcttaccagttctaatatttttttgagagagtctttaggtttttccaaatatgagatcatatcatctgcaaacaagggtaatttgactccttcctttctaattcggataccctgtgtttttttctcttgtcttactgatctagctaggactttcagtaccatgctgagtaacagtggtaaaaatgggcttccttatcatgttcctgatcttagagaaaaggctttcagtgtttcttcctttagtgtgatactaggtatatgtcttttgtatatggctttattgtgttgaggtatgttccttctatacataggtttttgaggatttttaccataaagggatgtgaaattttatcaaatgctttttcagcatcaattgaaatggtttttgttcttcattctgttgatatgatctatcacattgattgagttgcacatgttgaactatccttgcttccctgggataaaccccacttggtcatgaggaattatatttttaatgtgttgttgaatttggtttgttagtattttgttgaggatttttgtatcaatattcatcagtgatattggcctgcagttttcttttcttgatgtgtctttgtctggttttggtatcagggtaatactggcatcgtagaatgagtttggaagtatttcctcctctatttttcaaaatagtaacattgttattagttcttctttaaatgcctggtagaattcagcagtgaagccatcaggtacacagcctttctttactgcgagatttctttattatagttttgatcttgttgcttattattggtctgttcagggtttggatttgttcctggttcagccattgtaggttgtatgtgtctaggaatttgttcatttattccagattttttaatttactgggatttagttgctcatagtagccactaacgatcctttgaatttctacagtctcagttgtaatgtctcccttttcatctctattttatttatttgtgtcttctctcttttttcttaatctggctaaaggttaatctattttgtcttttcaagaagcaaactttttaatggatcttttgtattttccttgtttcaatttcatttatttctgctctgaactttattattttttcttctactagttttgggtttggtttgctcttgctttcctttcctagttctttaagacacactattgggtttttttatttgaagttttaattcttttttgatgtgggcacttaaaactataagtttcccttttagtactgcttttgctgtatcccataggttttggtatgttgtgtttccattatcatttgtttcaagaaattttataatttccctcttaatttcttcatgacccgttggtcattcaggagcatattgtttaatttctatgtgtctgtttagtttccaaaattcctcttgttttaatttctagttttcttccattgtggttggaggagatagttgatattatttcaaattttttgaatgttttaaaacttgttttgtgacctaacatgtggtctgtccttgagaatgatccatgtgctgaggaaaagaatgtgtattctgtgtattctgcagccattggatgaaatgtcctgtaaatatctatcgggatcatttggtctatagtgcatattaagtctgatgtttctttgttgattttctatatgggagatctgtcctatgacgaaagtgggctgttgaactctccagctgttattttcctgaggtctgtttctttatctctaataatatttgctttttatatctgggtgctccaatattggttacacctatttataattgttataccctcttcctgaattgaaccttttatcattatataatgaccttctttttcttttcttacagtttttgtgttgaagtctattttgtctaagtatagctactcctgctctttttgtttccattggcatggaatatctttttccacccttttagtttcagtctgtgtgtgtttataggtgaagtgtgtttattataggcaatgtatgtttgaaggatattagcaccagatatactattctagggtaaaagttttttctttatgccctgtaaatgtgtcatgtcactctctcctggtctttaaggtttcactgaaaagtctgctgacagacatattggagctccattgtgttatgtgtttcttttctcttgctgcttttaggattatttctttctccatagcttttgggagtttgattattaaacacctgcattagtcttcttcgggttaaatctgcttggtgttctataattttcttatacttggatattgatactcttttctaggtttgggaagttctttgttatgatccctttgaataaactttctacctcctcttcatggccaataactctaagatctgcccttttgaggctattttctagatcttgtaggcatgctttattcttttttattttgtcttctctgcctgtgtatttgcaaatagcctgtcttctagctcactaattttttcttctgctggatcaattctgctattaagagactccagctgggcacagcactttgggaggccaaggcggacagatcacctgagttcaggagtttgagaccagcctggccaacatggtgaaaccacgtctctactaaaaatacaaaaattagccaagtgtggtggcgtgtgcctgtaatcccagctacttgggaggctgaggcaggagaattgcttgaaccctggaggcagaggtggcagtgagctgagatcacaccactaccctccagcctgggtgacagagtaagactgcatctgaaaaaaaaaaaaaaaaaaaagagagagagagagagagactctgatgtattcttcagtatatcaattgcatttttcaactccagaatttctatttgattcttgttaattatttcaatctttttgtgaaatttatctgatattattctaaattccttctttgtattatcttgaatttctttgggttgactcaaaacagttattttgaattctctgtctgaaaggtcacatatatctgtttcccaggtttggtttctcatgccttaattagattgtttggtgaggtcatgttttgctggatggtcttaatgctcgttgatgtttgtcagtgtctggacattgaagagttaggtattgtcatcttcacagtctgggattcttcatacccattcttcttgggaagactttccaggtattcaaaagtacttgggtattatgatctaagccatatctgcatcgggggtaccacaaacctagtaatgctgtggttcttgcagaatcatagaggtactgccttggtattcttgcataagatccagaagaatcatctggattaccagggagagattattgttctcttccgttactttctcccaaacacagaatctctctctatgttgagctaaccacctagggctaggggtggggtgacagaagcgtgcctgttgcactgagactgcgttgggtcagacttgaagccagcatagcactgggtcttgtccaaggcctgctgtaaccactatctggcaaggccctagatacctggccgtacttaaggtactgttcacttaaggcccaaggactcttcagtcagcttgtggtgaatgcagccaagtctgagactcatcccttctggctcagggcaggtccagaaatgccattcaagagtcaagccttggaactggggaccccaagagtctgcttgttgccctaacccaccatagctgagctggtacctgatttttggttcttctgaaggtgtgatttttgcctagatagttgttacatttggtgttcctgtggggtggggggacaatcagtggggccttctattccaccatcttgctcccaaaggagtaaatattattaataataagatcagcatccaattcaagaacttagagagtaggcaaagcaaatataaagtataataaaagaaaaatgtgtgtattaataatatataaaacaaaactgaaagccctgaaaagactaataaataggttaacatggcatgtttgagtaaggaaaccactggaaacattacagctactagtatattggaaataatccctgtacatctggaacaagagaagaatgacttcgggttctgcttatgtttaattggttgttctagccagcattgtaggtaaaagaaataaataaaaggtagatagaaaagagagaaacctaattgttattagtaaagagacttcattgaaaaactattagaaaataatacaaaagttcaggaaaattgctagatataaagtaaaccacctttgtgtaacccagcaaaagacaattagaaaattctgtaaactacctttgtgtaacccagcaaaagacaattagaaaattcagtttaaaagcagataccatgaatacagcaaaaattagaaacatgtagtaataaatctaacaaaggatttttagaaatctttacaaataaaattacaaaattttaaggtaagacacaaagaagatgataaatagaaagatatactatacttaaagcagaatgactcagtatcagaaagatttcaattctttctgtattcatttataaattctaataagagctcacacaagagtggttttgttggttgttttcaggaacttgacaatctgatcaatctgattccaaaatgtatacaaagagctaagcgtcagtcataaccaacacaattttgaagaagtcgggaagattagccctaccacatgtcaacagctactgtaaaagtatagtgattaagacattgggatattggagcagcaataaataaatatactaggtttagaaatagactcatgtgtccctaaggatgtattacaaatcagtgtggtaaggatacaataaatgatgctaggagatataattattcacatggggaaataaaataataagtaccctttcttacaacatataataattaaatcccatgtggaatgtaggtgtaaaggtgaaaagaatagtaaagattttatgttttttagaagaaaatgtatgaaatatctttgtggccagtgggcagggaaggatttcttaagactaaaacccatttacgcctagtgttccattattggaatgctaagcatgtgagagttatttattatcctactgctcaagatcatcgccaaggcctgattgcaaaaattcaaaaaaattgcaacctcaggcataagtgggttaaaagacaaactataaagaaaaataataataggttgaatatattaaaacaaacatttttgaatagcaaataacaccaacaacatttttaaaaaacttcagaataggagatatttatagtatatacaaccaacaaaaattaatatgcattttgtatgaaggaatctttcaaataaatatttaaaaattcaatccaatggaaaaataggtgaaagatatgaacaaacaatcgacagaaaaaaatggctgataaacacacaaatatttgctttagctcactagtaatcaagtaaatgcaaattaaaaaaaggaaaattttatttcataccaaccagttttaagaattaaagtgtgaaagtgccaaataagaataaattggtaaaaccaattggaaaagtcagtttgactttacttagtaaagttaaacatttgcatatcttgaaggaggaattccacttctaggcatatatctagaaacatgattggatgtgtttgccaggggacatgcacaaggatgtttattctagcattattttgaaatagcatgatactcaaaaataaaattctgtatttctatcaacagaagaaagtacaaataaaaactgggatatttgtgcaatggacttacagcatagtagatgaaatgtataaattccatgagatacattaacatgggtaatgttaataaatttaataaacaacataatagcaacataaatttaagcaaaaacaaaaacaacttgcagagggattaatattatttgatgccatttctaggaagttttaggacattcaaaacaatattttatgtttttaaagaatacatccataggcagtaaaataattaaaagagggtggaaatcctaaacaccaattgtaggatttttctgtgaagggaggtagggaaggaggtaaatgggctcagagagggaaggatacactgggctttcaaatctaacggaattgtttgtttttttccccaacattttatttgataataattaaagattcataggaagttgcaaaaattgtacagatatgtcctgtgtaccattcacccagtttcccccaatgattatgccttgcattactatagttattatagtcatgaatttgacattgatctcatgtgtttgtgtagctctatgtcattttgttacatgtgtagatttgtgtaatcaccacttcaatcaagattcagaacagccccaatcactacaatgatctcccttgtgctatgcttttatagtcacagccacactcctttgccaccatatctaatccctggtaaccacctaatatgttcttcatctctataaaatattgtctttttgagactgttatataaattaaaccatatagtgtgactttttgaaattggctctttttctacacagcataatgtctttgatccttgagatcctccaagctgttgtatgaatctgtaatccattcctttttattgctgagtagtattccatgatatggatgtaacagtttttaaactattcacctattgtgggacattttagtcttttcaatttttggctactacaaacaactgcatataagttttgctgcgatcataattctttttctctgggataaatgcttcagagtgaattatggggtcatatggtaaatgcatatttagtttttaaagaaaattaaagctattttccagagttttcaaactattttccagagttgctgtaccattttatggtacagccatatgttgttgttcccttaatgacatgtgagagatccagttctctccatctttgtaagcatttggtattgtcactgtattttattttagcagttcaaagaggtgtgtagtgatgtcttatcatagtcttaatttgcatttctctgatggataatgtactagttttctattgatgctgtaacaaataactgtaaacttagtggcttaaaacaacataaacttacgattttacagttctgtaggtcagaagtctaacacagttttcaccagactgaaatcaaagtgttggtattcctttctgcaggttgtaagggagaatttgtttcctcatcttgtctaactcctaggctctactcatattcctcggctcatggctccccttcctctgtcttcaaatccagcatttgtgggttcagtcctcatatcatatcattcttacctcttctgcctgggtcttccacttttcagaacccctgtgattaaagtagccccaaccaaataatctgaaataatggctgtattttaaggtcagctaattggcaatcttaattccatctgcaaccacagccccctttgccatgccagaataactggttctgaggattgggtgtagacatttttagggagccattgttctgcctatcataggtagatatgttgaacatcttttcatgtgcttatttgccatccatatgtcttcttcagtaaaatgtctatgtctttttgccattttcaaattggattgtttgttttattagtattgagttttgagggtttaaattttttttgttgtagatataagtcctctataatatttgttttacaaatattttctttcagtctatagcttgtcttttcaatcccttagcaggggccattcacaaaacaaaagtttttaattttgatgaagtccaattcattgatttttaaaagtaaattatgcttttgttgtcattctgtataagaactcatcaccaagcactaagtcctaacatttttctcctgtcttctagaagttttatagttttatatttaattctaccacccatttcgagtaatttttgtataaatagtgaggtgcaagttgagatttattttatctatttaatttgtctgtgaatgtctgtatgcattgctccagcaccacttgctgaaaagactatcctttctctacagaactgcttttccactgatgttaaaaataaattggctgtatttgtgtggggatgaattgtttcattccttaatgaaaagaggaaatacaataaactattaaagtctaataaggctaagggcatagtcatgtgttgttttttatatttttctgttatattgaaatattttaaaatcaataacgtaataaggaggcatttgcaccctcaaactctgaaaatattaagaaagtgggtaatgctatagtgagatgttgatcacagtggattggagactaatagctgtatgatattgataaggttactggcctctctgggcttcagttttattttttttttgtgaactgagagggctgaactaggagacccctggagtcttttgacatttgcatgctcacatagtatgtgatgcttctcattgttgagtttagagtaagagatgtggagcgggatctaggctgtcattctggtttacagcctaaagatgagacactgtttatatttccaggtagaggctgcctaattaactacaggttcatagtggttgggagcaagccctctttttcaaactacttcgggaggttttattatacctgtaataatcattatactatagaagatatcattgtagtttcttataaatacctcacacacttcttctggatttcataatggggtcactatatgatgcttcttgggatctgatttacaatttataaataagtctgaaatataaataagaaaatacaatgtataagagtcctagaggtttagtcagcagaattccaaataggagtttaaccctctaaggagcacttacagtcttcttagaaataaacacattgtaaaatgattatgagaaaatatttatcatacacattttaattgataatttagctgttatattttaattagaaaagagtttctgattttctttatggctatgactttaagcctgttatctagaacacagtttatattttctggtttcatcatgacagaaggcattttgagaagggctagagcaagaaattagcaacaggacgtcaatttcgtcttctttgtttacttcttctggctagtagcagaatttttttctatcagtaattttggcatcaataaaataataaaggattacaaacttcatccatcatatgccaacaaatttgataacttacatgaaatgtacaaatttctggaaagatagaaactaccaaaaatgacccaataagaagtagaaattccaaatagacctacaacaagtaaacagattgaattactaattttaaaatttcccacaaagaaagtcccaggcccaaatggctttactcgtgcattctaacaaaaatttaaataagaatgaccacaaatccttcacaagttccttccagaaagagagaaattggaattttcattcattgttggtggtaatataaaatagcgcagtctctttggaaagctatttggcagtttctgaaaacattaattctagagctgcatatgacccagcagtttttgtactccctagtatatatccaagagaaataccatatatctacaagaaaacttttacccaaatgatcatagtagcattatttataatagcagaaaatagaaacaacccaaatgcctatcaacaagtgaggtgacaatcaaaatgtgatatatccatacggtgaggtattattgagaaataaaaagaaataaagtattgatatatgctacaacatggatgaaccttgaaaatattatgcttagtaaaggaagcaagtcacaaaagactacttcttgtatgactcaatttatatgaagtgtccagaatagacaaatctatgaaagttgattagtgtcttccgacagctgggaggtttgggacaagagggagtgattgttaatggacctgttgttttaaatgttattgatttgattgtgttgatggttgcataactttgaatattgtagaaacgactgaattgtacacttcaaatggtatgtgaattatatctcaagaaaactgttttttaaaagtaatgtgaatatgtatgttgagatagcatggtatgtagaagttatgcaggggagtggttaagatcatcaacttgggtcagagtgcctaaggtcaacctcaccataacagttgtgggaacttacagctttcttaatttctctgtgtctcagtttcctcacctgtaagcataataatagtgcctttatcatggtgtcatctttaacattaaatgagctaatatttgaaaagcatttaaaacagtatgtggcacaacataagcactatataagtgtttgagaaataaataaatataggaagactacaatatttgtttcttggaaaattaccttttatttcaagagtttgatcttcctattctattatgttaaaatttccctttgtaaaaaaaaaaaggaaatgttagttacagtagatggcagttattttgtaatatctttaatttgctaaaggaacagttggcacttctatattgatctcaaagtaattttaaaaatattttttgaaattgtacttttccatgaaatcttaaattagagaaccacagttctataactatgtctttgttcagtggcctttggaaccagatggctcaaaaaattaataaccattcaagttttaacattagaagagtattacagatattcagctacctagaaaaatacttatcatataggagatgttaatgaatgtgcattggaatgaatgacaagaatggatcataagtgtgtgacttgctcagtgtgtgtgtgtgtgtgtgtatgtgtgtgtgtgtgtgacaacgacctctttctactggtatcctaaagtctgtatagttatatctgatatgcttgagtttgcatgtttctgctaaccttattcccatgagatttcactttgaggtatttatatggattctaatcttgcagctaagttttagaatccaatcctcaaagtattaagggataattgggattatttaatacccctccccaatttttctgtaatgttttctattagtagtatggctgctgctatgtttgcatgtgttcactatttttatttccaatttctattacatttttatttttcttcctagtttctgcagactatttaaataattttatttggtctgtctcaccctctgtgttggcacttttaatatctttaagagaaacttgaaaatattttagctccatagagcacgtttcagtttaccttttgtattccatagcctggatgtaaggcttctttatgttttgtgaacagttagaaccacactgactgctatgaaaatgcttagtaataattatgcttcctggatccttgtgaaataacctgctttactcaatttagtacacaagttattgagaaacatctatagcctttttcattgcagtgtgggacagtagttcagtgcataggatctgaggcgctgtcacatctttcttgatgtctcaaaaacataccattgattttgcttcccaagtctagatttaccaacatgtgagagactgatgctgcagtgccaggagaattattactgatcataatccaagaagaactgaccagagaattaaagcatttaaagttgcaagaagtaggtttattccttgactcaaaaaggcttagtataacctacttgcacccctgtaagcatctaaattattgtcttaagagaacagaaccataatgataaccacagtattgcttaatatctgctgctgttttaaagcatttcccacagtatttcattgtgtcttaatgttactaaactttatattgcaattgcttagaactgctttaattgaagcaatttaaatttacatatcctactgagccactttgtgtgtgaagcactaacatgtgatagtggttcttttttatagattacaaagttacaaacagttggttgtagatcttatctgtgaaaataaaaagccttgaacaaggctaatgagaatgattagagggaatttattaaaaaattgactaaggcggtccccctccctctatactatgtcagctcacagcgggatgtctccaacatttattgtctgtttaactcatttttggcatacaactattatgcaactgtttcaaatattaatagctcctctccacagctaaactgtgatcttgattttataccagccctaatagtgtcaaggacagaggtgacaacatcttaggagctcaagacgaagaatttgaggtcattgtcctgagaggtcatgtttagttacatagcagggaatggttatataggattacaactgtcttatttgaataatttactgcagccctttgaatgtgtatttttttcatagaattttcagttactttgtctctttgagatgttcccgtgtattgttcaaggcatggatttttattggacatactggttgcaagtgatgataatccaacttaaatggatcctatcattgaaaattctagggttagatctggatcccaggctagaaaaatatcattaagatcatttttttttccattgcacagctcagtttttctctttattggcttcattcaagtagactttactcctacaaccctgtcaccaacataaataatttgccacaaagtttatatcttattgtttcagcaacctcaatagaacaatagcttctctatttgttttaaataaaagtctcaggattgcatctcacaagactgatgcaggtcatatgaccccaattgaactaatcactatagctaggacagtgtcgtgcaccaagactgcctgagatgagagatgagaagtgtggattcaccaaggaagatcatgctgtcactatcagaaaatggaagaatgaatctgttctccccacccaacaaaaatacatagttttaatttctttctactttatgaagtattcccaattatatttctttttcttttatgcgtgaacacacattttctttcctctgtaacaaacttctacctttaacattccccaggtcatcactgcattctccatgtgaacagtaagaataatgagagatcagcgaagaaagcaaaccttaacccctgttcctgccagaactaagggtttcaactgacatcttctagagtttatgccaaagcctacctatttctgatggatgatgtttaaatttccattgcatcctaagctccacttcactttaggctgccaaatgattttagaaaactcctcaatgaagattgtgtaaacaaaatagtggttgagacctttacttatgtcatcatattcatttagtctagcacttttcctctatcattgactcaaagttctctttagccaaacatcattgtgtcaaagatcatggaatacttttgtaatattgaaagaaggcccagcttctcctttcctaaaagtgttatgtcaacctcagttaaaatcagtagtccacagttgtttttgccaaaacaagaatgaattacattggtggtgaaagtccctcttctagtggcagagagagaatctagaataattcacccactcgggatatgggtggtttgcaaggaatgaaaaatccaactagaataagtttccactttgcaaaggacatcacatttgcccacttttgtctaggtagcagtgttcaagaatggggacttgttttttcttcagaacctctagtctagtaattttattgaatgatttcttcaaaaactccactatttcaaaataattaaaaactcatttgaaaatcaataaagccctcaagatgtttttaaagagtttctagattcacattttagtttctcactttaaaatcattgttttttaaaattgaatttaagcctttcataatttattgctaattgaaaacaaaatcaacaataagcataaaatcccagttgtaatccagcacagcctcccagatgcttgttgccctattttgatgtgtcctttcttttgaagagcttgggtgttatgtggtcagcactatccaaacaattaatgtgattgagtgaaaatgccccttcagcagaaatagtttcttctgtgaggaggctaaactgccattagaatgaagaagagttatgtaagactattttttatccaaactgattgggctgaattccagatttctctaatgaaaccttgctgaataactgctatgcttgcagctgtggaagtattcaaaatcaagtgctgattcttgccaattgatctactacttctaaactgcagttctaaaagctaaacccaagtgattgttcaaagaaactgattgtacaggaatttacttttgatgatagtaagtgggccagaatctaggacatgaacatatcagttgttatgacaactgttgaaggagacctgtcttgatagcatggagttttccattggcatttggcaaataataccatccttcagaactcaggagaccatttacaaattaaggatgatgatacttatattttcctagcttctctgaaatattctgaaaactagttcaagatttaaatatttttcttttattctttagcgtaaaaaactttagcaatctttaagaacattgtgatcaagcatcttaggctaatctcaggataaaacattgtgactgacaaaaacaatgctttataagaaaaatagatatgttaaccttgtgagaggaatgacttgatcttgtggttgtcgttttaaaatgcaaataatacatcataagctgaaaacataatactggctaaagattgctcttaaaagaggaccaaagttctgaagtgaatatattgaagtgccaggatgtttattttttatgaatggtgagccacatatacttctactattaaattatagtcttacagtgtctcaaaattttcagctttccaatgcttggcttcttattacgtgcagaaagaagagaatattgatatttcaaaatctagatgtatcagcagacttatattgaaattgttttaaattgatccctaactattcttagttcccagccgttaccttatatattgctgcataacaaatgccctaaaatttaatggcttaaaaccatagccattctcactatttgtcatgattctttaatctgacatgggcccagctgggtagttttgtggctggcagtcactcacggctgtatttagcaggcaggtttgcagtgagctggagctaggctcagttgggatgctgggatgacttctcgctctctgtatagtttctgggcctctctcttttcacatagtcattccatgtggctttttgtttttttgttttttgttttttgttttttttggtagtttagcttcttacacagcagctcagggtacccaaaaatacaaaaataaaaatttccaggccttcttaatccttaaacccagaattggcacagcttgcttttgcagcattctatttattggttaaaggaagtcacagtgccaacccagattcaaggagagaggaggatacaaggatgtgaatgctgggaagcacagctcattggggggcacccaagtaatcatctcctgcatgatcatttattgattcattcaaatggcatgtgatatttctctgttcattatgagaaatactagttacccatatactctgttgtgtcgtggatagatggatttagttagacctagttcctattagtagggctttgcatagcctttgctaatctctgaaaaatatcttctgtatatcaagcagacatgaccttgatttgcagaggtgacagtttatgaggagaggcagatataatcaaataactaaataaatatatgtgttcatgtgtgtgtttatagttataaactatattataaatggtagagggaaagtatagggtgccacgagagtacatgaatattaggaaagggaagtcaggataatattccctgagaaagagatgtgtgtttgaattatttaaagggcaaggagagtagagtagaagagtaaagtgatgggcaatgggagagatgcattccagcaggcgaccttgaggtgcgagagagcatgacattgaggggagaagggtgtttgaggaaatgaatgtagacaatgtgattatagtgcaggaagttagggaaaaagtgatgtgacgtgcgactgcaatgaaaaaatgggagccagagcacatagggacttactggctatgataagaatttgtaagaacaatagaatagcactgaaatatttaagagatcagctgaagatcatggcaaataacaagactgacaatttgtaaaaataaatctatcctttgtgtggagaaccaatttaagaggccaagagtgaatgtgcaaagactaattaggaggtttttacaaaagtaaaacccttccttccttctttccttcgttccttcctccctccctccctccctccttccctttcctccctccctccctctctcccccttcctcctttcctctcctcctcccttccctcccttctacccttcctctcctcctcccttccctcccttctacccttatttccctctttcctatcacacaatcatttgttcaatatatacttctggaatgctgctgtagccagggactcatccgggtgctaaggatctatcaatgaacaaaacaaagtccctgacctcatggaacttacattctgggaatcgtatgaaatatttctcactatcctttttacatacagtcagttctctaatctttatattttatgcacaactgaaagggaaagggtactaataattaccaaatgccaatcatatattaggcatatccacctatgttatgttatttaataactaatggcttactgtgattctgactgtcccatttaaattctgattgtagaaacatattttgtttttgtgactgattggggaaactttaaatattcaagaagttaggtataattatgtgtttatgcactatgtgcatatgtgtgtatgtgtatctatctatatatctatctgtttgtatatttttccctctgtcaaaaaataggtggtttgttcaaagactgattggaaattattttaatatagactgaagatgacagactcatcttcaaggttagaatttgggatggcgaggttagaattaatcaagattatgggttgggatggtgaagttagtttaataccatttaaaatattaatatccaggtggtgtgtgtgtgtgtgtgtgtgtgatgtgtagaaattaacaaagacacctgagtaaagaaggatggcttgggactggaagtgtcagatggcattgatgacaaagagtttggggaaaaatgagaacagaagaagaaaccagtaccactcttgaaaccacattccagtttagggtagccttaactcttgtttcttctgattccagcctgctttcttttagcttttgcctacagttgaccttccttgcagcattaaaagaaagaggttgttaaaaatgcacttaaaaaataacgctgtttttcaaataaaaaattaaatgtctgcatttcaaggcatcttttctacatttataaaactatctggagtcaaggcacatgcattaaggcttacattatttttgtgaaggttcattccaactgggttttttctttggttctctggggcaccctgtttgatttatttgagcagctgtgatttaggattgattgtcactgtaatattatagttctaatctcttgaagtctagtactttgtttttatagttcacaactgggaattaggaagttaacctcagctgtcaccatatgtgacatggatataaagaaagatttcttagcacagtcactttaaagaacccttttcatgtcaataagaagcacttaatggtcaatttacaggttgttactttcctttcaagaaatatccaaatactttgatttattaaaatatttttgaggtttatattcaaataacaaagttgacaggatttagactattgtacctttatatatccattatattctctaggtttgctattatgctttttgttctagctatatttaacctgcatatccatatacttattgatttaatattttgttacagtttcaaaacaaaaattaatgtgtcagtagcccagtcgttaggagcatgaactctaaaatgagattaccaaggtataaattctgattctgtcactatgtgaccttctccaagttgcttaatcattctgtgcctcagtttttctatctgtaaaatataaatagtaatatgatctatctcataagatttttattctatttaaatgaggtaatatatgtactgtacagcacttagtagagtgttaggtacccattaaacaaaaggtagcttttagttaccattattataaagtggaaccccagagagttcccatgttagaattcagcaaagtgaggagttgggttctcagctttgcaggttgagcaattcagttttatcagtgatcccagatttaatcatctcacagtctctcagatgattgaacaaatgaacctaatagtgactaatgtaagagacagaagctccatttataaaagtgacaggaaaatattttgaaacaattactgaggtgatttttttttttcatgcaatcccttttacctgtagttctgtttgcctcttcaatctagatctcagtctctgtgcctcagagaagggagattttattagactaaaatctaatggaggaaaaaaacgtttattaatggtctttgagtttgaaattctaaagccctggtataaatacgaggcaagtaagaaaattcattcagtcaagccctgtttgctctgcctgttgactaatgatgaagatcctcttgacatgggtagaacaaaggaactagggaagatgaaaatgaagtaaatgcagatgttggtccctgaaaagttctctgccctgcaccccactgcaaaaccgagatccctgaggaggcagcgataatagtctgaaatgaatttgaggctccaagagcagaaggacctgtcccttgcttcccaggtggtacctgggaaaatacccagatgctggaattttgtcatatcctgggatagtatgacaccagttgaataggggtgatgctataatacagcatgatgtggtatcttgggccaagaaagcctaagttaacttcactgagtttcttatgatccctagagtggcttgctctttccctctccccgcctcccccagattaaaaatggccacgaattctttctacctcccatgaagggacagagtctaattcctctccccttgaatgtgggctagcctggtggcttaattgatgaatagaatgcagcataaatgagcatctgtgacttccaaggctagataacaagaagttttgcagctttcacttagatttcttagaatgctccccacaaagaaagccagctgtcacataacaagtctgaccatgctgctggagagcctacctggggaggtgctgagactgcctgtaggggagagggaggagctcagttaagtcctgtcttccatccatctcaccaagatgactggcatgtgaatgaagccatcttggatttccaaaccagttcagccacagtgaaacaccaccaagtgacccaagggaagcagaatcacacaacccagttcttaaaaatatgacccgtggggcatgaacattataaaaataattattgttgtggccattaagttttggatggtttacttccccacaatagataaccaggtcatagctcttcatgtgctcttagaagagggctgcaatagacagagttgtctaacttcaacctcaagaagtcttttggtcagagaagaactcacaaactgactcccaagggaacacttgggaacaatgctatagattatattttgtaattatgcaatatctaccttaaaaggacctcaggggagcctctttttttaagtttgaacaggaaaactcattcatttgcacatcagcagtgggcattagcatggacaaatgttgacagagaagcaaacaatactgccatgattggtatcattggagttgtacaacactgcagccttgctagccacccacttactctctaagtcttagacactacccaggaaaaaggggggatggtgaggaaccttcatttcactgggaatatcctcatatggcagaagaaactgtgatttgtctgaagactatcatcttgaactaagttggttatttgccagtaggaaaaaatggagtttgagaattaagaatagtaatagaaaaatgaaacagttattttttagcacaattgagtttgcagcttgtgagatcaatatctaccatagtaattaaatatgtgaagtacagccggtaagccaattagaaaatccccattatctgattagctcatctcttcctgtgtccatttattcttttacagtgggaatggtttttcggttgtgatcagaaccattgtgtctgctccagtatgtactcatgctaggaggataaattagtcatcaggccattcagtcatcagaagttctgaacaaaggtaataggagaagctctgtcttgtgggtcatcatgagcctgatgaaccacttctgccttacaatagagaacagctctttggtgcttagaattcttgtggtgtcccatgccctcattcagtattgttctcttccatacgtgctaaataaattatagcagattctggcttcctggttaccattgatttccttctaatgtgaccattccacaagtaatgacaaacttaatcgataggtatgtttatactgttaattaggtatactcaaagcttgtttgggactttgtaatatggcgtctttcaaggatctcctcagagatcagatttcatttgttatatgttgattttcctaatttaactcagagtcctgagtatctcactgttgcctccatgtactaagggtcactctattcccaccctgtcctgcaagacattcagtgcagtgccaaccacacttaacaagaaggatcccagtaaataagaaagaggaagcatttacatatttttgcttaggaaatgaaaagaaggaaaacttttaacatctcattataaatatctaccacccagtaattgagttatagcttatattgtgcaatttacaattcatatctttaaaagagctcacagttacctctatttgtaagttttgacagcaaaaacctgttcatttcttcatcaaacattcattaatccctaattagtaccaagttccatggttaatgcttattaacagtcctgtgaaaggaatattaaaaatatataaaccacaaggcccataataaacatatgaaatgtttacttttattagtcatcagagagatataaatttaaacctcattgagataccactatacatttatgagaatggctaaaatgaaaaagactaactatgccatgtattagcaaagatagatatggagcaattataactctggtaatggaaatggcatacccaactcggaaaacgttcagtatcccttaaagagttgaatgtacatctaccctatgatctataaattctattcctaaattgtattagtcatctggataacaaattagcacaatgttaatggcttataacaagaataaacacgtatcatttcaatttctggggaatcagtaattcagatgagggtttaggtggtttggactcagagtctttcatgagatttcaggtaatatgttggccaggtctccagtcccctgaaagcttgactggggctggaggctctgcttccaatacaggttactcatatgactaacaaattgaggatgacagttggccagagacctcagttccttgccatgtggatcccatatagtgctgcgtgagtgtcctcctggaagctgacgtgccctggagtgaatgattcaatagagagcaaggtggaagcttttatgacctcacttcaaaagtcatactccatagttttgtgaaatatcctattaatttcataaattagtcctattgagtgtatgatgtatgtatgtgcggggagaagggtgtggctatgcaagagcattgagataaggaagcaaggactattgcatgctgtttttggagtctggctaccacacaggtatttatcccagggaaatggaatgaaagtccctcaaaaccttgtacaagaatgttcatagcagctttatttataatagccaaactaggtaacagcccggatgttcacaggagtctggataaacaaactgtagtatattcacacattggaaatgcctcagtgataaaagagaactactaatgaatgcaataaagttaataaatttcagaaatattattctgagtgaaagaagaaaaagataatatataccatattattcgacttgtatgcaatcctagaacaggcagaactgtaggtgatagaaatcctatgtgtcattgcttctcacagggatagtaggcagatttactgggagtgggtaaaaggaaacttttggggtaatggaaatattccatcaaatttatcaaaatcaactcaacagtacacttatgttctgaagattatatgtaaattataccctgataaaaaatacaaggcataatccaaggaacatgaaagacaaataagccatataattgataagagagaaattaatacagaagggaaaatattaaaaggagaaactaaggtacatatatttttcaaataagtaaacacatggtaattgtagataattttaataatatcttatttttatatttataatctccacttctggaataattgttgatttattttattttgatgtacttcccagtcttttttcatgcatttaaaaaataaataagaacgtttggtatttgagattttgtaaattgattgtgtttgtgtgtgtaaatgtgtgtgtgtatgtgtggttggccttacagtataaacagtcctccaaattattaaagactatttttaagcatcactttcaattgttatattccattgtaagactatttataatttatgtaaccgttctgttactgatagacctttaggttgtttctcattatttaaataatgcagtggagttgttcataaagggtgatctttagtgttgaggattatttccttgggctagggtttccaaaacgttctagatcaaagaatatgtttcacattttcatattgctttctacagggtttaaattattatacacatttaccagtagtctattaaaggacttattttaataggtaagtgaagtaggtatttcactatgctttgataagcatagtgaacactttgttcatgtgtttattaaccattgtaattgagaaaaatggctgaattgagccttaaagaatgaatagcattttaaatatcaattgaaggcaaagatggggaaggttttttctgcaatgttcatggcatggcaaacaaagtcattccatgtcaacctcatggaattgtaagtcatttagtataaaagcttagagcagttgttctcagtcttggctgcacaataggatcacctgagggagaatgtaaaaatctccaatatctaggccttactagaccaataaaatcaggatagttgggtgaagaactcaggcatcagtagtttctaaaagtccccaggtgattacaatctgtaagcaaaatgtgaaaccagtggtatagagtgaggtgaaatgggataggttgccattagagatgaaacagaagagatgaagaccatatgtagcaagacacaatgctctaggataaattgtatacttcctgggcaaattagcaaatgctgttaggttagtgtccctttcttatcatcttggagtcctttacctttttcatgcactcatgcagtgtgcattactcccaaccaacaactagcacctgatcttgtggacaggctgcaagcaaaccgcccccactgccacccacaagcctggagacctgggagttttttctccacacccccaggacataggcctgaagcaatgattgctgatgatatgatataagtaatccagcttcctctttcctaatcaagataattctgacatgtgaactatactagtccattcaagtagccaatatgcaaactttgccttgttatctaggacaagatgagcttgtgccagaacataaatctgtatgctgcttccttcacaaagaaatgtttctatgaaagaaaggtcagctgaagtaaatagtggacttactgacttagctgcaagcatcttatttcatcatggaccagtgacacagaccaaggatctgcaaaccacactttgcgtgctctgcagcagtgaactcatttttaaaatatccttttcttgccatatctaaggtcccggccttagtttagatgcccattagttttgaggtttagaaccactggtttgcatttcaaaacgtaactcaagaaccatgccaatatttcaatggagatggtagcttcctcagaatttgtaaactgaaattctctttgtgagatatgtgttatttactgtagacttcatagctcatagactgattctaaattatatttgtaaggtaacttaggtgtatcccacntatctgacgtggagcaagtattgaaaactttctggtgctcagttttctcacttcttgaatgaggaaaatgaactacattattcctaaggtctctttcagttctaaaatgttatgttcaacaagagctactagattatgtcagtgaaacaaacataaaacagattattccagtagcaattgtcacttctcaaaacaaattgacaaaagtcatacatctattgtaacaacaattctccaggaagctaacctttgcctgtttttcataaggatatgtttactgcttttaactttgctttggaaatgggtaaccatctaattaggttgataaggtcaacatgcaggagctttggaaagagattggataatatttgtgagtgtgtatatttgcctagacatgctttttgtcaagtttattgtactttaatgattagctagaaataataaggctgctgtatatgctattttattaatgctgtgtcatgtatgggtttttcgaaggtaatttgaaaatacagagaaaatataattatttgagggtgcttttagaagaggtggatatgtttataaaattaaatagtaatttaataacacaatacttctcaagacagaattcaccagtatacatggttcatagagagggtttgtggcactgaatgagttttattttccctgattttcaaggagcatgtaaatgcattttggtgtgatcttgtggatcaagaaagatgattttaacatatgtaaatcatttctgctcatcagtttgtcacatcttgtccccaaacaaccctaaaatagttcaatattttttagactcttttgttgctcaacttatctaggaagaaatgtggacttcacagtcatatcacagactttccatttgaaatgattctcaattccattctcttctgggctcttacacttttgaatcctcataaaaacatggggaattaggacatctgtgtggcatttttaaaatttattcttttttttccttaagtgaggtataatacacagataggaaagtatattgatcttaagtatacaacccaatgaatttttacatatgtgtacactagtataactaccacttgaaccaagatataaagcaagatttaaaaaatctcttctcatcccttcccagttaattttcctccatttagaagttaccaccattttgacttcaagcaccataacttgattttgcctgttcttgttcttcatagaaatggaatgataccttatatttgctttcttttgctcaatattgtgtttgtgagattcatgtgtattcttgcctatggtataataaataatcattagcttcatttttactgtgatgtaatactctatggagatttcattttactcttgatagatctttattttcatttttcagttatgaatgtctgttgtgatttttgatgaatacatctactcattcattttttagttgacatagctagagttaacatggctggtttgtagggtagacataattcagctttagtaaatgctgccaaaggattttacaaagtgatagtactaacttctatttctaccagtgatgtatgagagccctagttcctctgcatttgtgcccatatgtgatattgtcagtgtttttcattttaatgattctggtggatgtgtggtagtatctcactgtggttttaaattttatttctctaattaataataatatcctatgccttttcatatgcttactggccttctgggaacctgttatatgaaatactattcaaattttttagctattttcctttaattgtctttttttgtttttgatttgttctttatgtattctgataaatatgtaaaaaaatcaaattaacaagtatctgattccagtctgtgtcctgctagttttttattaataatttattttgatgaacataagttattaattttaaggaagtctaatttatcactattttctgtgattgttcatgctttttgcgttgtgttttactatgtgatttgaaaatccagtcaccacaaaatgcattcaaattgacagatgctaggtttgtttctttccccattaaaaaaattgtaatattcacatacataaaatttaccatcttggccatttttaagtataaagtttagtgttaataaaaacattcataatgttgtaaaaccataatcattacccatctccagaactctttttattttataaaaccaaaactctgtattcattaaacaacaactccccattcctccttgtccccattgtctggcaaccccctgccaattttctgtccctatgattttgactactctaagtatgtaatataagaggaattatacaatatttgtcttctgtgcacttggtataatgtcctcaagatttatccatgctgtagaatatgttagaatttccttcctttttaaggctgaataatattccattgtatgtatataacatactgtgacttaaattctggcttaccatgtttgtctatcctgaaaaatgtcccatgtgcattgagaagaatgtatatgatgttattgttgggtagtgttccatacctgtctattagatcaaattggttattgtgttgtctttcattttcttacttgattttctgtctgattgttctatccattaatgaaagcagagtattaaagtatccaactattattatagaactgtctatttttcttctcagttctgtcagtttttgcttcatatttttattgtcctattggtggcataaatgtttaaaatggttatatttcttgatgtactgaaactgttactaatatgtaatatgtctttctttgtctcttgcagtttttttgatttaaagtttattttgtcttatattagcataaccactcctgctctcttttggttaactctttacatggaatatttgtttcatcgttttatttttaatctatctgtgtctttggatctaaagtgagtttcttgtagatagcgtattgttggattctgttttttaatctatgctgccaatttgtcatttgattggaaaatttaatccatttacatttaaagtatgtaatcacaggttgaaataaagaaggaagcaatttcctcaaagaagtaggtatgccactaccaagagaagggaaataaggtgctgggcagacacaaataatagatgtctattacaaaggaaataaaaatgcttgactcatgtgagctggttgttgaaagtctctggctctcagaactggggctctatagaggatcactgcaggcctaagcaaaatagaaatacaagatgcaattccagactcttacttggaagtcactttcatggggttttaaggccaaaggtggatccctatattacatccatcagaataaagcgctatctgattttctcttactggttccaaggagatgctcctgttggtaaaataggggccccagaatctcccaaattatcacccttaaaagatcttgtgttagtaattcatgtttaattccctttccttcctaagtttctccaacatgagtataaaattcttatggctacaacagcatttagataattgataactgtgacagataaacaacatagttgcttttgaataattgctacttctagtattaactctgtagcaataagcacttcttagggaactctattcaattcttatttctatcttatttatattgggatatgtgattctcaaactttaacatgtgtacaaatcatctggacggctggttaagatatagattgctgggccaaatctctcagagtttatgataacataggtctgggatagggccccaacatttaacaagctcctagtgatgctgctgttgcttgtccagggatcacactttaagaagtagataaaagatacgtccctaaacatattaacatgaataagtcctttatacatcatattttgtctcattagggaaactttcaattaaaagaaactgtattttctttggaaaataaagagcctttattataaaaatgaaaatatttgctcctcaattaattttgcaattttgatttgcttgagggttggggtaagagatagattcatatatcagattaatttcttggaggccatgcatcttgcagaagggaaaaaaatcctcataagtagcattttttaaaacacaaggatagttttttatcccattgcaagtagccttaacctctgctctacagtttttttatctgttcagcctaatcagattttgtggttggttgatttttcttttatttacgtgttcttgttgtgtatataccagataccaaatgtctttaagtagtatttccaattgggattaaaaaggtctgattctaaattctgtcagttccagatttggtcgccaaatgaatcatagaaatcgctacagaggagtgaatcatactgctctctttctatcagtcatggccaataatttcagttagcctacctcataaattaaaatctgggagcaagaatttttttggtagcaacgttgcatcagtactgacatacaagagatgattctgagagtagcatgggagagaggaagaatacagattctgcaataataactgtatcaggtgatatttttcttcacctgttacatttcagatgatggaactttaagtattgagtggctcaaggacttctggggcacagagattccactttagaagctttctttcttccttgaacactttaggtttaaatgtctccttttaggacaaactcctgtttggagtatggtattttctctattctaagtaagtattaagaatcaataagggcctctgtcctctgttcagtttctgaaggaccatgcaccatggttaaaatacttgtccataatatgtcatgatagtgtggtatgcctgctaacatcactatttcatactttgcagtttctaattctgccctaacaagtaatctttaattcttcttcaagtattaagataaataatattattaaattggtatctagtagttatactaaattcatttttattaagttcattaacagtgcctgtgttcaccaccttactcgtaggtaacaaacatggggcatcttcatttaaatcaagtttaaaaaatattctataagttatgtaaacacacaaactagaaagtattgaagataacacaagagaaagattgtcaaagtatcctgtctcctttctatgaatttgctggagaaaatagaaaagtggactaggtcatgagcagaattgagtttgtgtgtatttcaggacaccgttgacgtttccttggctttaaatgatttagaatggtgcctggtggtagaaaactttctggaggctacatgagaagtgatactaataaagttttcatatgtatgtactctcttctcaaagagaaaacattttatttgtgatcttagcatctctctcaaggagatgatatggaagttgagcgtctgcaatggttcgtaaattgagggaaggtttaattcccaccttgttcatttaagtatcatgtactatgataggctcaggggaaaccaagaaaaattcacttcccatgacctcaattaatttcaattatagtgaaagaaacattaaaacaaaattataatacattaagatgattattctaaaagcattcagcataaagtcctatggtgcctacagacacctaatctcgctggacgagtctgagaaggctgcatagatttacagggcaattgagggccagagggaggtctaggaaaatggaggacaggtgccaatgacagaggcataaaggaagactggcttgtcattgtgtaaaggtgtagcagaaacgcagcagccaaggctactcttggaagcagtggctccataatgcctggccttattgactataaaaaaagtttaaaaaaaatttattctgttgtcaacgggggaagagaattttgaagaaatggaatggcaaactttcctagcttttacagagaattgcgaaaagaatcgggaggggagaagaggtaggcttccagaaatgactcccagaacaagaccatccgactggtctcaagagaatcatcccagaaggctgcccgtgaacctttggagttcaagaacgtatagtatgatggaaatcctgggaacaggaggctgccaccaacatggctgctacaattcttcagacaccatggtgtcagtgactccacacagggccattgctgccccaaacctaatatttccacacccctatttgccagcaacaataaccaaagcaataggaaaatagcccctgcttcgcttctgtctgccagctgtctcactagagcacatgaaactggtggaatctaatatgtatttgaaactcttatcgcaaagtagtctgataattgtagtttttgcctttccagactccacaatacaggtgagctctctggaagaagggagaaattaatgttgaggaccaattcatcatatatactagacaaaagatggatgacatggataaggaaatctatagagaagagaagcacctgagaacatgaacattcaagggacaattgaggagactaaggatgaatggtcacggggtcaagggaagaacgcaggaaaatgtagcattatggcaaccaaagaagaacaaaagtttaggaagaaggaagtggataataatgggaaaatgctgtagtgcagcagttatcaatttttgtagtatgacatcttttcagtaacaaaaattctgtgtacccctagtattaggcaagactttgttacagaaaatcaacttaaagtcatttatgcaaaaaatgaatttattgacacatacaactttaagtgcagtggggacagatctagcattagctgcttaagtggtgcaatcgggttaaacctttctctctccctcttttgctttgcttgtctgccctctgtattggcgtcattgttaggcaggctttttccatgaaactaggaaaaactgaactctggaaaccagacctacatattgcttacaacttctgatcccaaaagaagagaactttctctcttctagtatccccaggtcaaatcttagggaagagattgattggcctggcttaggtcaggtgcctttcactgcaccaatcacttgcaggctgtaagcatagagtgctccaattggctaaatctgggttacatgcccatcctgctggtggagggaatcttgtcagtcacacccaaaacatggaaaggatttttccatgagaatcacagaaagttatgatttttctattataaaaagagaaaatagaaaatggatgctaagcaggcaaatttaccagtctgtgacagttccacataagaataattacatatttagaatgtgttacttgagaaaaaaaatatatatataatgacaaagagctactatgaatttagtgacacttaaaataaatttctaaaattcatgataacagctgctatgtacatttaaaaattacatatatatgcaacgatatcttccttttgcaagtaatgcttggggagcttctagatttatgagcctctttcagtcactctgaagcctccaaaacacagatttcttgccttgaaattaagttaatcatggattcaaaaagtagcctatgcacaatttcaggtgttcttacataaagacatgctcaggaaatattttaagacattttcattcagtatatagagtaccagtaaatactgtaccttcaggtgggtgatttgctaccacccaaatagctaatttaaaaaccaaaataaaccacgaaaatgagggtaggggtagggaagcacacacagtttcacaagtaacatcttcttttaatttttttctagttctctcttttctgtttttcatttttaatatgcatatgatgcatagacaacaaatatggaaacattaaatgagaaaaaatatataaaaatgttattcatataatataaataaaaatatacaaataaaacgcgtaataaacacaatatataaaacatatatacaaataaacatttgtatatatacattatacatatatatctatatatatatttgtatatacatatatatattccctaccccacccccccaagattcttaaagcaagtagctttctcttgaggacagcttagagacctgtgccatatgaaatgggatctggacccgtccccagtgccctgtgaagggttgctctgtacattagctccccaatctgcaaaatggatgttgcttgacccgttttctttccgcctcctgggaactggttaaagtccacacaaactccttcaacctccagggacagaaatggcatctacgagctaatgtgagggtccctgggtgcagagaaatgtattaggagctgtgtttccggaatgacggtttcgttcttggtctactgagcgtcaccgagctcggaggacacctctgtcatttcagcagagtgacagggctcaatgattccagcgcccaggtggagagaaagcggctgaggggcttggccggctcctgtcgcgcccctcagtccgccccagtcccatgcaggctcagcgccaggctctccgcccccgccagctgtggctgtgccgcttctcagcttgggccatttgcagtggcctggcctgccataaaagagcatccaccattaggatggaaacgcagctgttagaaatagaagcaccaaagtgaaactgttcttggtccctgaggccacctggtcatcttcccctacattgtagcctaccagaactacctgggctgtaatctaatatttctgaaaaaaaaaaaaaaattaggaaaccctataaaaataataccgtgccatgagtatttacataaacagtgaggtttgaaataggttttaaaacagttaattaacatggtttcttagacatcaaagagcttccaggttaaaaaaattggggaggggggtgtatccttttttacttcagagatatttttgtttcctttttgggaaagcctttactatcttttgctaaataagcaaggagttggtctggaataatttaattcgcttcctggtggaatgcagctttattttccttgttttaaggattgaatgcatctatgtattgattactttgctgtttcaaaagttaaatttgattttataatttaatgaggctgctttctttattttagcatgtggttttaaaagttgtttttttaaaaaaaaaacaaatgagacatctcttttttgaggtaaatcaaaaaatcaaaagcttgaggatttatatataattttttcaattctcagtttatctttgccaacattaatggattttttaaaaacctggacaattactaaaaattgtcacaaatagcagttttactaaagctttgcttttattttgagttaatatattagatttagtacatttgttaagtagttaaggaaactggcagtattatttttttcccaatttagaatctacattgacatttgtagattctaagttagtatggatctcaaaatttgtgctttcaattcacattgagggaaataagactgagctgctgtgtattttcctttcttttcaatgtattttgccttatagctgcataaatagaaaagtaattacttaaaaataagtaatttacttacttagcaaggtttctgatggtagcttttattaaattctcaactaagataattattgcagagaatttcccaacttaaagcaaacacttcattaggttcaagataattaaaaaacacaaccattttatacttgccttcatgatctttctgtctccctccttccctctccctccttttctccccctccctctttctccctcttttcctctcctcccactctcctccctccggctctctttctcatctctctgccagcgtaagtgtaataacttcttaaccttatctcagaagatgaatactatgcccaaactaggaaaaaaatcccacactagaatgatgttgcaaaaattgccataagataatgatgacattttaccatcctgtgacattatcattattgattcttcctctattttatttaatgccatacaacaataggccctttgctggattgaagtgttgctaaaattctagtgtgtttgttttttagatgaatggcagaattgccaacaggaagcttttccaaaatctccattgttatccagagagaaaagaatgacatagcaatgtttttaacatttcaacagcataattttctttgtctctggaaaacgggaagctacgtatcattaggaatttcctgattaatttcctaaagtataagggttctagtgctatacagggagcaacccaggcgacctgctcattaacactaaaaaaaaaaaaaaaaaaaaaagaaaaaaagaaaaaatactttccttggggacaagcaggatttctaagggcttgctggcaatgttatttgactgtacatagaggtttccagcacagatttctcttccagctcagtgaaaataagagtccaggcagcctggctttaaatcagttgatagaaaggcaaagatctcagaaatctggttttaatttatcagctttgagttgctttttccttcaccttttcatgcttgtcactggctgcctaacccaagtgaggcaggtttcctgtagatcccatctgtcttgccggcacctcctgcacttgctggcatcccttgcccttgttggcaacttctgcatgctggatagtgtcccgtcaggtctaggataacggttctcaaagggcagcctggtgccattgctagtccacagatagactgcactttgatgcattaatgatgtttaataccacagtgactatatttttactttgttatactgatcattgttgctgcttataagaatacaatgggagacaggattctgaggctgggtgctgggggaagccatttaaaatctggcagcactggcgggaaagcatacctggtgctgccaggttggagcttggtgcccttttctgcctttttcatgacacctctaagggggagccattgtcctgctattctctttggctttctttttaaggggctgtgcacccatagatttgctgtagccaaaacttacaagaccgtaactacacagttcaaccctacatacaccctgtgatatctctgaactcttctctactcctctcttccctgctcacttggccccagctgtgcttcagacacaccaaggtacttccagacacttacaggcttcactcctgcccctccattaagctgttactcaaatgtcgtcttttcaaagaatctctttctgggcatgctatctaaaattgcaatccctactgctaatacactctatttttgtctttgcacatatcaccatctcacagaatgtattttactcactaatcacttacacattttacttatatttacttattaacttagtatctgtcctccctctgtagaatataaggtaaatgaatatagaggtttttctttttgttcactgctgtattttgcatgcatggaacaatgcctgtcacttaataggtgcttaataagtatctgaaagaacaaatgaacagttagaagcccgatacatttatttcttaatctggtttatacccacagcagcagaaatgctataatgacttgccccatttaagtttgggtcaaaattcagtatactgacttattaatgaagtcatttggaatgagtaagagtcctaggtctatgtcgatcacactgaaataagagcagaccattgattgattcaatactaaatgtgattgttctataactttctgaacacttcatgtaacagctctgtctaaatctcagaatctcatttatacctcatcactgaatatttttagaatattgaaggagtttattggggagagaatgtttactatatctcaatcacttcttatatatgatctattttaattcttataaaaacagtgtaaaaatacattattcctatttgaactgaaattctgaacatctttttaattactcaaggtttcacaaattatgagagaaggttatgatcttttcaagttatgctgtaaaataaggacttctgttagaaaacaacaaataaatgattagactaccctccatgttattcatcctctgttagctgaatattcgtcttaaagtagggccctgccatgccattctcctgctaagagtctgcattggtttcctactggatcaaatccaagctaaggcactcaagtgccaagcaaggcactcaaagcctcatatagtctcatttccccttaaccatcttaggttatttacctcagctgcctgtaacaaatcctctgctctagtcaagaagtttctcttcttcttttcttccttcctccttattagccacccctcctgcgttaggcacccgtttactagtctgccctgcttcagggacttcttatttcttctctgatgttcctttcaggcatgaatgtcattctttttttcctgcttatccatacaccttatggacctatctgtaagatccacctgtaaattacacactttgttttcatgtccctagcctacaacaaataatctctctcatttttcttttcttaattacttttgaacttatcaggtgtaccacacaatttattaatccttatttaattacagactgtagcattctataattgtttctagtgttagccttgctctctaaacaagattgtaagtgcttaaagagatttatgtcttatactttcccgcctatactttgtagagtagaggttgttttattaagagatgccctacaaatacttggcttttcatcctgtataggtatgagtcctgctattaatagaaacaatgacatcattttaggatagatagtaaaatgtggtttatccagcagcagatccttccaatctgatattagttttatgcattttatgagcacacatattttcagaaagtcactggaagattttgcttctgttatatttgaaatttgaacaccaaacttccacattgtgaaatgtttgcatgaacacttttgagaactttagatgaaaggtgtagtataagtacaaagtatgcatcttcaaaaagcaaaatgaaaatgcaaatatttagaaatttcaaaacaaagcatgggaaattttgggtatattgcaaggccaaataattcatcattccatttctagagcactagaaaaggttgggaaatctgtcctttgaagccttagagtatgtatatttttctctttagccctgtgctgtttccttgaggatatgcctgtagcaataaaggtaatcgggaaggctttgaatttctgagacagtgttaagcattttttaacatcagattaaaggtggcaaaagctagggatgatctacaggtgacttcaaatcaggggttacattgcaagtccgtcttttggatgagataagtcaaagtgccagtgaatgtgttttggtggcaagaaaagaagctgagagggtcaggatgcagaagtcagcattttttcaagaaacactgggatagaatttctttgtgtggaactgtaccatgtctggagatacctcacttaatgacattagttgaatactgtgcagtttgtccaattttcaaaatgaagtacatttatgatttttccctgtcatgcatatttattgccttttctttttttgttttattccttgagatagggtctcaatttgctgcccaggttggagtgcagtggggtgatctccgctcactgcaacccccgcctcccaggtttgaacaactctcctgtctcagcctcccgagtactacaggcacacatcaccacgcctggctaatttttttttttttgtacttttagtagagacggggtttcaccatattggtcaggttggtctcaaactcatgacctcaggtgatccacccgccttggcctcccaaagtgctgagattacaggcgtgagccaccatgccccaccctattgccttttcaggaaagtttttggagtgttctgaaggttggggaggatccacattctctatctttagaagctttctctttagtgtccctttgaatgctggcttcagttcagtggataataggtggatcaggctgggtgcatttttagattttgtggtatcagaatttgaaaacaagatctgctccaagggtaggggcaggtcccactggtagagacaaaaggatgttttgccagtttgcaagcagagtgcaatgtactgaaagaggagtgctaagtgcaaagttgcacatctaagccagctgtcactgggcaaagtcctgcaaagtctcacaggtggcaccccatgggccggcccatcacaggaagacagagcctgagtgtggccagtttgtggtgctccaggcagtgggtcatgaagctgggctcaagtaggcctggcagctgacagcggacctagcctttgagctggggatcagagttgcaggcttaaaggagctctcaggcagaaacctggaagacaaggaaggtgggggagtatgataaggaccagctgctgaaaacggggcacacgtggctacaaaaataataataatccccacagataataataataaagatagctaacacttattgatgcttactatatgtcagaaaatgtcccaggtccttcacacattttaactctatcaatccttaaaggctggtactgctatcatccccaccttatgggggagtaaactgagtcccagtaaggtggaatagcattgcagagctacacatctaattagtggtagaatagacatcttaatccaagcattctgggttaaaaagtctgtgtgtttatcctccaggctatcccaccttcaagtactaaaaggtgatacaaaataaattgagtctttacagtttattggaaagggcaaaagctttgagctagagagataaggatttggatctcacctctaccacttgttatttctgacattttgggaaaatcatgtgattatcttagatttgctatatcatatgtagaatgcgggaaatgccatccagcccattgattttgaagaactaagtgaaataatagatacaagctaattagacttcatctggcaagaagctgccactcaacaaatatctgcttgctttcattctctaaatgcccattcgtatagagctctttcagttacttccgattggaaataggattattccagggcacaagtctgggctaagcttgagataattagggaagccacaggtttcaacccttgtgaaaagaagaatagatagatagatagatagatgacagatagagacagatagatagatagatgacagagagatagagagatatagattagatagatgacagagagatagagagatagctagctagctagatagatagatagacagacagacagataaaagacaccacaggctatagtgagaggtgagacagcacctggctgtttcctgcctgcttacccttaaacaatgtggtgctttcttcttttaatttacagaaaaatgtgctggcaagtgcttttgtatacagttaattcaatcaatgaaactttgcatcttaaagatgtaaactaatgctcacttcaggaacaataattggcaaatttaaaaattattcatttttataaacatgttaatcttttgctttcaagattttttgtgttcattaactttgttagtactcagaactgactgaaatgattctaagtttgaatttctataattatgcttgaatttcaaagcctaccttgcataggatggtggctagggcataaatattacatcctatctccagttaaggcatggatacctgcaccatctttcatatgagaagcatcaacacaattctgactataaaatttcatgatcattctttccacctacaacttttttggatctttagctacgaattacatttaaagctattactgtatatactttttctgtacttaaaaacatatttgatagaaatagcccacgtgttcgctgtagaaaaattagattacattaggcacagaaattaaaggagaaaagccacccataattccagtactaaatagtatcaaattttgaggtatatccttccagattattttccatagatgttgaggcatagtacagaaatgggatcacactctacatacagttttgtaatctgtgctcctcagtcagctatttattacaataaacacctgtatattcatatacattatcatctgtagtagcctcattccattgcatttttatagcgatactaatttaggtaatctgctattgttaagtatttaatttattcactaggccgggcatggtggctcatgcctgtaatccctgcactttgggaggtggaggcgggtagatcacctgagatcaggagttcgagaccagcctggccaacatgatgaaacccgtctctactaaaaatataaaaattagtcgagcgtagtggtgggtgcctgtaatcccagctactcagcaggctaggcagaagaatcacttgaacctgggaggcagaagttgcggtgagccaagattgcgccactgcactccagcctgggcaacaagagtgaaactctgtctcaaaaaattattcacattgtttttattattatgaacaaggctttgactgtcatctttgcacatccatgtgtctttttttcatactgattcaaggggcatgtgtgtttatcaggcttttgatgtatttgccaaatacatcaaatatctagaaatagcatgctgactatactccctctggcaataaatgagtgcctcaaaactgtatttttttttcttttcatgtaccatctgatagacaaaataggcatctccttattttattttttattcatttgttttctcgcatggttgatttttccatatcattaatttaaaatttttaatttatccttttttgtaaattcatgattattttctctctctctactgggacatatttattttccttactgatttttaagagttctccatgttgtacctctttaactataaaatatgtaatatgtaatattttcccaggttgtattgtatattaaaattttttgatatatagaagtttttgttttaaaattgattaaatcacaggctggggatggtgactcacacctgtaatcccagtactttgggaggccaaggcaggcagattacttgagcccagaaatttgtgactagcctgggatccatgaggaaactctatctttacaaaatttttttaaaaaaattagcccagtatggtggcctgcacctgtagtcccagctactagggaggctgaggtgggaggatcacttgagcccaggcaacaggtttgattgcaccactgcactccagtctgggtgacagagccaaaccctgtctcaaaaacaaataaatagataaataaaattaatgaaatcattttattcatagtttatgcacttagaaaagcatctggcatatatagtgctcagaaagatcttcctcacccttagagaaataaaacgttcacatatattttctttgagtatttccatagcttcctttttcatatttaaagtttgaattcatctggactttattctggcataatataagtcttaaggcttattttcccaaatgattatcaagttgtcccagtataattgattatcctgtgttccatatgctgataaaaaatgttaactctgtcaaatatcaaattcttatgtatagttgtatctctttggtgtttctgttcagttctattggattctcttctagtctggtgccagtatcaattattataattattacagaaattactcctttgttaatattgtctttcagaaatgttctggatatatttacatttatttatatgaggtcttaaaatacacaagcaatgggagacaagggggaattgcaattgggggtaaataaagcaagtttggaaaaatgttgatattgttgtagctgtgtgatgggaatgtgggactcatgatcctatttactctgcttgcatgtatgtgtgaaagtgacgataacaaaactttatataaataattaggtaaataattcagatcggaactgcatgtaattggaattgcacatgctttcctctttagaaacatgttttttaaaaaaagtctccttttatgtacttcaatgaagttttgtagttcatttctttatatagtccctctacctttctaaacaaacaagcatacaaaacctaagaaagcttcttcatgcctagtttttaagttgtgtgtgtgtgtgtagcaattatatttcaaattgttggtatataggaaaaccttgatttgtaatcaacccagttacttaacttaaaaaaaaaaactctatttctttctttttttttttttttgctttctttttgggaggtttttcaagtagagaatcctgtggtcttcctatagtgatagacttgcctcatcattttcaatatttatgattctcctttatgggatttattagctagcactttaaacacattggcaactgagggtggtggtagtgggtatttttctgctgctcccggctttaatgagaatgtcttccatctttgatcactaagcaagacattggctatttgagaaagatatgacttttggtcccgttttattaaatcttaaaaatcaggattcagtgttaagtgttttcacatgcattttagacattcttagaaaggattatgtgtttttcttttcccttggtctattactttaatgagttatattaataggtttcttactattaaactcttctcacattccagagtgtgtaaactcatgaataatatggatcttgtgtactgtcttacagaaattccctaaattgatggcatttctccatgagttttctattgtttcttgcttctaagtgaatttgggagcaaggagagtgaaataaatggactgaaatttctatcttatactggaagtctggcatacttgcattgactgtcatctacagtagagtcaaatgtactgactgaaattcagctatggttaaagaatgtggcttttatttcttatagcaaattttctagctctagattctagctgtagagccatgttcccattaatgaggtggggaaaaacacccaaactttaattcatttcgggattagaatagtttcttttgggtcagtatgtaaataattgaaagttgagctatatatcagaactgtttttctcctcttcaatgacttctgatgtcttccctaaaacataaaataacttctgggtgcaggagaaaacatacatatcctggatttatacttactagccatgtaatcttgtgatgattatttcagctttctctaccttgatttcttcatctgcaaattggatattaaaatgacaactattttacagaattttgtgggaattgaattagttaatatattttaagtgattagaacatttcctggtacatagcaaatgccccataagcgtttgtaattataatataaaattatgattgttctcatagtgttaggagtgaagtggactttggttcatgtgccattttccaattgagtgctcttgggatgatttggtgtctgtctctcctgcctccactttgaagtatctgaagctggtttaatactctaattctgttctcttgccataagcaaagaataggaattacatctgtttttgccaactaggttggcacccaactcttgctgggaatatggggtctctttccttagtaatatttatgaatgagataatctgtaacaatatcttggtatggtatgatatgttgtgacatcatcttcatcttagcagagtttggatgagttagaaactgaaagaccattttaatactaagtttctttcattcagctacttctacttcagatattaaatttggttttactttttcatttatatgctttcgcttatattacttctttagtgaattaaagagatttttaaagagaaaattctagcttctcaagcatcattgtccttctgaaaaattgaactaataagccctgagatgattaaagcgtagccgatccttagaaaagaaattgccattttccattttcactaagaaattcatctattagcacaataatatttatgagattttgctgttgtgcaatccctcattcatcccttatcaccattttgaatgaagagagagcaaaatctaattccaggtgccagatgggtgccacacaaatggcaatgattcagcacaggctccagttacagataccaagctctgaacagctatttggataatcaggagatcttggtgaactgaggtgaattttcttctgtgtgtcaggtcctccacttgttctttctctatattcagagcctttgaatttgctatgaagcttggtatctgctttgtcctagcagttaagagttggtgtcacaattcacatcttgctggaaaagtgatgggttcattttgaggctcattgaatgagtccttgaagaaggaagcatcaaaatgaaaaggatttcaaatctctgagtataaggtttgaaatgttcatttgacctcactgatggctgtggaaaagcctaggcttggacacagaaactgaaggttaaatcttgtactataattgagtgtctctagaattagtacaggcttctctcattttgtggcagtgtaacagcagactaacaatcctgggaagagtgcatttttaatgaaacatttttgcagggttagtaaaatccagatctcctaaaaaacccaatgcttgcttactctaagatgagaaggataagccaaattcaaggcttctcactatgccaccaggttatacaataaattttgagctcccctatcctacatttcgaaggattaattctaactgtaatttaccttgattcttagagctcgctgaggctcttggtgttaaagacatatcaggggacaaagtaataaaaagcttacatttaaggagtgccttcttagagttaggtacagtggttatatacgctgacatgtaagttcatcatttagtttacacagtagtagccttgaaatgtgagtttcagtatctacatttatcttgatcctgacattgacatgcaaaagggttaagtagtttctcatggccataaaattagaaaatggccaaaacagaatttgactccaaattctttggaatatggaatatgactgattccaaaacctaatattccactgattagttttgtctcttcatctctccgaatcaacatctcttacataaattacttttgtttaggggatatcttagagttcttgttttataatggagtgagaaaaaaatatctccttaagaacaaaggaattaaaacaaggcactacattgaaggagtttattttatctaccacatatacactgaatatgaaagaaaaagagtatattgaaaatgattctctaatggcagaaaaatattataatttatgctgtactagatcttgattttgttgcttgttatttttaatgtctataataaattggtaaaacagtaaaactcttgaaaagcaaaaaaaaaaaaaatccaaattctttgcccacttttttttctgctgttattttatttttaatgtaaaaaagccaactgctctttatcattcgttagaaatttgctccaaactaaggggcatgtacagttttcaatttgtgggtgttaatgactccaccacagtgggctcattcccttgcaagggcgctaacgggctgttgcttcctaagagacagaggattgagaggttttggtttctactcatagtctttggtttcttggctctgttattttccttgtttatgtttcttttaattaacattgagtttcttcattttatgccttgcttttcttctgtttgtacagtctgccggcaatgactccttgggtagcacttgttaattagggagaaatgatagcttgagggtacttcctgacttacttggtgctaggataaaagttgttctactgaagccgcattagaacaacttttatgtacctacctcaagtaagatctgcatgatgctctaccaattcccttttgtctctttgatctttactttaactctggtttattttatttaaattctcattgtgtcccaaataatctaaaccaagagtattattaggtcttaaaataattcacttgtatttttcttaaggaggctattcacagtagattttgtgggaaaataaaaattagaattcacggctgattgactaaataaaagcaactaaagaaccaaagggtatgttgattttaaaaaggaacttctgaaggtatctggctcataattacccagagataataattttggttctatagctcagattgagaaagctatacataatataatgcaggatctataacatggattgtctttctcaatttctcactattcctcactctcacctttccttctctctttcagctacctattcctatctaatctatctatctatctatctatctatctatctatctatctatctatctaactgtctatctatctatctatctatctatctatctatctatctatctatctatctatctgcctatcttgtttttgccagagaggcagaatggttcatgttttagaacctagttggtctcatgatacaaagtacagactatgatttgtaattaatgatttgtagacagcagtctctacatacattctacaaccctcagtgaaatgccatttctaatacttctcaaatttacaagtattcagacagcagattttactttaatatgggacaaaaaaacattaaaaagaataaaaggctcagtgccttgatgaactccacttttctttgtagctagtaagcagcttgcaccagagattttatggggatcatcttgctatcattttattttcctcatgatgactcagggaattttatcctgaggctctcaatggatctgttatagtcaagctgatgatgacacatctcagaggctcattccatattgggcctcaggccagcaaactacgcaccatgctgtcctatgattcacaggacgaaactgctctagacacctcccactgcccaggcaggaagggcaccataatgaggcagtgggagggtgtatggctaggaaagttgctaaaaggaagcttttgttgtaactttcttctctgctgcaggaggctaacaccaaagcaaagtattatcaagcaacagaccctacatttatgcaatattaatgagaaggtccctggacttttaattagggtggagagttgtgttttagagagctgaaattattttaggtgggaggaaatggaatcctgggagaaaagtaattaatttatagctcaatgactgaactgtgccattttgaaatactggtcaaggtgagcgttgaaagagtgggtactctggcatttccatacccttgggagtgaagaattaggctatttggggagccaaatgatatgcttgtatttccaaaaatgtcatttattttgtaataaatttgtgctgaaataaaaagtggcttgtgttctctatgtaagtgtgaccgcctgcatattattcattcaatggtcatttacagcatactttataggtgtggaattctacagatgccttttctacagggacaaagttctgactagatgcacaaaggagatgaaaagaaccgtcaatgtctactttcatgttcctttccctctacgtggggaaaaacatcagtatatgaaatggcatttgaataacttaaagagaagtgttcacaagagcagaataactcggaacaggctttgaagccattaggtgtatgaatcatttactgcctcctcgggggtcccacaccagctattctgagattctgtcagagcacttagtgtattgtgttatttgtctctgtcccccactagaatgagagttccacgtggagagagatttttatcgtatttatctctgcatccctggaccctagagcacagttcattgcataccacaagtgtccagtaaatgtctggtgaatgaattagtaaaatagattgctgttatcattttggaggaagagaagggaatagaatgatggttttatatggacataaactacaaaggaaatgatttgattcttttcagtctggagacaaaatgtgcttttcttctcttaattctctgttcaattcagcagaaatcagtaaacatttactaagcatattttatgttgtaattgtatatataaacatgaaatgttttctaacctcaagggacttagagtccagggcaaggttggcagtgacgtacaattaaacagatcattttgatgtaatttgacaaatatactgtgggaggcattcaggaggcattatggagggagtaaaaagggatgttaggtcaggctggcagtgggaatggggctgggatattgggagaatcaggaaactcttccaggaggagatgacacctgagttgagtcttgaagcaagacattcccaaacaaaggaagaagagcatggctatggggtaaaggaagaggggaaaaagtccaagacagaggacagggaggtgagaaaccgtatggcgtatgcaaagaattacaagtggttccctatagcaagtgagtgaaacaatgctgtgtgggaggtcaagggatgatactgcaaacagcagacagggggactcctacttaccatgtaaaggagatttatttggactttatgctgtaggggataggcagctattgatagattttaaggtggacttgaagtaggcagtattggtgacaagaagaacattagaaagtgcctgaatttgtgtagataaaactctggaagactgtggtagtggtagacccctcttagtgtatgagatatgtatgtggcgggttaaagtatacacatggcagctaaaacaatgaaaactagtggattatcaagaaatataatctagaacagaggctcccaagtgccaatcaaaagtggtggtgctcttcacccttcatgattattatctggggtattggtcaaaagtagattcctgagtacctgtcctcaaagttctgattcattggtggagagtcagccatctgcattttatggcattccctagctaattttgatatgcagtcatgtttgggaaatgctgataaaaataatatcaatggtatcactcatattttagatgtagacaaaataagaagaccccgtgaagtagcaagaagttgagcagtcagttggagaaccagcagaagacagaggaagagggattttctagaaggcaaaacaatgtgatagcagagagttctagtcagataatttgtgaaaagtttgttagattttgtgatatggaggtctaggatctttagagaaagtagtttaagtgtggaaggagtaaaacttgcttgcattgggttgaggggtagacagtgggaataaggaggtaaagaaagataacagacattttttttcaaatagcttgattttgaagagaaagagaatgatatcttgaggagggagaacatagggttataaggataatttactttttacaagaggagagactcaagagagtatttagatcttgaggggagagaaccagttagaactagagcagatggaggaggaaagacaggcataggtagaagacaggactcctcataggaggagaaacacctcactcatcctctcagacagcgggaaaggaggtaagggagagtaagctgggtgaggaaggaagctgaggcataatttttgatgggatgttcagagagacattaagaggctcaaatagttgaaagggtacaaagctggttgaaactaaacctaggtaaagagccctattgttaacttactattttaaaaatatttttcttgaaaattgtgacagctttttcttttctttttttctttttctttctttttttttttttttttttttttgagacggagtctcgctgtcgcccaggctggagtgcagtggcgcaatctcggctcactgcaggctccgccccctgggggttcacgccattctcctgcctcagcctcccgagtagctgggactacaggcgcccgccacctcgcccggctaattttttgtatttttagtagagacggggtttcatcttgttagccaggatggtctcgatctcctgacctcgtgatccacccgcctcggcctcccaaagtgctgggattacaggcgtgagccactgcgcccggcctgtgacagctttttccacccatattgcatttattttctaacttataataatatgaacctattttgtagattgagctcctgttggtcctataaaacccaaatctcttgcttgctgattcagttgtttatttgcatttgtctcatgttccatgtgttttgcattcccggaaactagcacaggcagggaggcctcaacacctaatttatttcctaggtgaagtggaacctgaagattttccttttatagacaccattactagatctgaaagaaagaggtaagttaattgacacccaaatggaggatgaaaatagtagagtcaggaagagagaacttaattttagccatctgttttccaacttggcttttctcagtctatagattcccaaaaacaaagtctaacattgggtacgaaatagcaaacttgagcactgaaaaacaaacaaatgagaaagcaatctaacaattccacgaacaaaaaactagcacttttgtatgtcctctgaagtaagaagagatgagtaacttttgtattcactcaaatactttcttttaatccaacttttaagtattttttctaagtgttgaaaatttgagaagccaagaaacatagaaatgagacagaactacccataatactgtacctaaatataactactaatattttgctaactttttcagtcttttctctgtgcataactttttataggataatattacacatacaactttaatcctgcctttttcacttaatattataacacaagctttttctcatataattgaaatatcttgcaaaatatatgattttaattacatagtacatcatgaaggttctcatattttatttagcaattcctttactatttgacatctaaattgtttccagattttcattattttaagtagcactgctggaatgtttctgcatacaaagcactttccatatttcaagttacttcctgaattatgatataaaagtgtataataccattaaagcttttggtacttattatcaaattcctatccaaagacttatgtcatttggaaagttgatcagcaatatatgaaatgcatatctaattatatatacaccattttcaagtattttatttttaaaagtaaaataatttttaagcaagacaaatcttgagattttaattttcattttattaatagtgagattgaatataccccatattttgatataattttatttccaattttgcaaaatttctacttattaattaaaacattcatttttgtagatttatacctctaatttttaacatattttgtaaatggtacaatgtatgttacatattaatactatggcaaaggcaaaagaatgataatgaattgctttcaaacttaaatatatatatattttttgagatggagtctcactctgccacccagcctggagtgcaatggtgcaatctcagctcactgcaacctctgcctcctgagttcaagcgattctcctgcctcagcctcttgagtagctgggttacaggtgcctgccaccatgcccagctaatttttgtatttttttttaatggagacagagtttcaccatgttggccaggctggtctcacactcctgacctcaggtgatccacctgccttggtctcccaaagtgctgggatgacaggcacgagccactgtgcctggtagaagttatattttttaatcatacaacttgcagtatggaagagactttacaatgtaccttattcaaccctgtattattagtttgttttcatactgctataaagaactgctcaagactgggcaatttataaaggtaagaggtttaattggcttacagttctgcatggctggggaggtctcaggaaacttacaatcatgttgaaaggcgaaggggaagcaagacaccttcttcacaaggaggcaggaaggagaatgaacacaggaggaactaccaaatacttataaaaccatcagatctcatgagaactcacccactatcatgagatcagcatggggaaaacagcctccatgattccattacctccatttggtttctcccttgtcacgtggggattatggggattataattcaagacgagattttgggtagggacacagccaaaccatatcaatgccccagttgaagaagcaaagattaaacccataaaacaattattgaaaaaaaaatgttagctagtagatgagtttgtggtacaacatactttttgttattggacctcagagtcagtagaaatctatgtgacttggcgcagtaggggaagttgttattagaaagaagggcttttgttggactttgaataggaagagttctgtaaaatgaagagaacaaaaattaaagggcatgaatctaaggccaagaggtagaaatggatgtgtctcaggtgcggcagagatgagaccagcctggagggtagagggctggtgttgggagatacagtgtgaggtaaggccaaattaagcatgcaaatcacagatcacttgactcttctagttgaaacacatcactctggagttcctactgagcataagctacaacctgattatataaagccatccttgtggttacaggtagattgcactgactttggcaagtttcaagatgttaaactgtgctgggaagactacaagatgggttgacagataaaactagttttaggaaaatgcatgcacagggcaatattatcagctagccacagcaatggccatggaatacagggtcctctcattattgtgttgtcccaggcagttctatgaccttaggcagactacttatgttccctatacttcaattaccctatttgtactctacgttctttctaaatctcagattctatagcctctagcaggagctcagataaagcatagcttcagataaacagcactctagagaaaagagagaaaatgtaaatagcaggaaatctctattgtcatctttagatctggaataagaagtcctttcttttaattcacaattttagaaggtatgaggagatatccagaactttcttcccttgtttctgctaccaatgtagcagagggccaactgaagcagatgttcacattatctatcttacgtgtgtagagggcaaattagtggacatttaagagcccaaggcaataattcaaccattcccatgaaaaatctgttattccatccttgtatgtttcttttcttttaactttttgagtatttaattcttgtgttgcctcctcctaatttccttcctgcagatactttggtgagtaaaccttgataaattaagcctgtttttattatattcctttggagttgtctttgattgtgatcaagcttctctttttatacatgccacatgtattcattcttcatttagatgagaatctaatcaagggaataaactgccaagtttggtttcatttatgcaaccctagaaaaatatatcttttgatgagttggagacaacagtaagttagagacagagctaatccattacaccttgatcactcagaggcaactgtacccaaacaattctttccctttgcatcaagaaagtttgttgtttatctgagagcttagtactgtgcctggcacatataaggtgctcaataaactttttaaaaccaatgcatctgagtggctttataattcagcagttactgtatgaactgacttactatgtagaagaaaaaagtattagttcaaaaagaggagattaaagaattcttcttacatatataaaacatgtcctgttcagtagcttctctaatattttgtggatgattggaatcccttttcactcatatttaaggatgtcattatgtatggggacatttgctgtttcaatacatagatttatatttgcagggaacttaaagtccccggaaatttttctgagatattatctgattaatccccataacaacgctgtgaggtgggttgtggagatatgaggggaaaaaagggaagggattttcctaataccatacagtttgtgtatatgacgtagcaatgaaagtagaacttatttcatctgatgaccagttcaagacattttctgctatataaatctttaatctctaggatagaaactgtcttaattccctttgcattgacacagcaaaatgtatataggtggtccatctaattccatctctgaatattccagcactatctgtcttatccacctcctctattcatttttatttctaaagtgttctccctgcaggagctgactcttccttctttctaattaactttatgtggaaactcctatcgtaacgaaattgcacgtgtgagtgttctctcgcctggctttctttttagtgcacctggagggagaaagcttttctgcagtctcaccacattatctttgctgagagagaaacttgcaggaactaagataactgccttcctgagagtcaaccttttcatcaaacattctttagtttaggcacagctttgatttttgcagaggttaccacttgttcataattaaaatgcactggttcatgctattggcagcaaagcactatggaagagtagacaaaaacgtggattttgaggcagacaaatcaggtgtgaatactggttctgccattcctgggcaatttacttcattcgttgctgctgatttcctcgtttgtgccatgggaaaacatattaacaatgtctacctcacaggagtattggaaagtttaatgatacattatagagatttttttaaggataaatgaggtagcagaacatgcaatcctcttcatagactgcagagcacatctaccatttcccctccatctccactctcctccctgccctaccttggggggctttgaaccctggaaggctgaccagtcagatgtacttcttcctcctttgccctcctgcttgcttgcatttggttagtggggagtcctaggaggagacagatggagaaaggaaaatgagactgcgtgcaactggttgtcttcttctttttagggtctagctgtgtcccagagagcaacttcccttttcaaggcagcccactctgtgtgatgctttttcctaggtatgggcaacccatccctcctagggtgaaaacttcgctgttgctagttccaggtactgtgccatcctttgtggattcctctaccctaccaacatctccttaaagagtctctttgttgaacctgctgtaaatgatcctaataaaagtatgctgtctgtttattcttggaccttcaactggtagattattcatactggttagtggaaagtagatctgcctacatatgtattatttgagagaggttagcacttatagaagaaaaaacaagaatgggctgtttttacttgccatttgatactaagagaaaaagaaggtagtgatgatggatgatgataaagatatgatgatggtgagacccaaatacctcctatgagccaaacattctcctagacaatactttttacctcattcattttgaaaacacatatgtgtattattatctttcttttgtagatctggaaaaagttcagataaatcaaataatgtacctaaaagctacatagaatgccagtggagagctgaaattccaacctatacctatttggttccaaagtctatacccttttactgacgctaggtgcctcctagctatacagggtgagaagagccattccatcagcagtcagttttcaactgaatctctctgcctattgaaatttctctaagttctaaattcccataggaaagtatctcttaatgatggtctttaaatgatttcaaggcaaattttttaaaaacctggttaattcagcaaagcttatcaggtcaaatccattatttgtctgatttgactgatttgttaccattgagtcactagcccagtagggcaactattccatggttgtccctaaggctactcattaaatcctggatgaataattaaatattttgaataagtttttctctgataatatatgtttcctacggctgttatctaaagttttttctccctagatatggaatatttcattcagtttgtattaatttctgtccaattcctaaattacatgagtaacataattctgcattttctgggacctataggatgctaatttgtaaaggtgattcaattcctggaggtgtactagctgagaactttccattgtggatcagctcctcccttcaaatcctactcctttagaaaaaatccatacacactcagagaaacagtatttatcttagcaactcacatttgattgtgcatttttctttaatcttcaggcaagcatttctatcaaccttggaagaaggctttgtcccttgtttccctttgagtccccaagttgcatccagagatattcttagccacagtgaaccttacttctctgtttctacctctactttgctgttacgggacctcttacctcccgcaaagtgtcttccttttattttgagaagacttgagagggtgactcacatatattccaaacaagtattttcagcctttaaaaaggctgtgttccttgcaggcttctctgctttcattttgtatgtttttttaaaaaatgatacatagttactttgttttttatcttttaaatgtataattcatactactttgtactttaatattgtcaatcattttagcaaaaccagctccttcagaccttaatcactgttactcttttccttaagtctcagacacatgttttttgagaagcttacaacaaacccaaatgatagaactacatgctgctgttagcatcagcctacacctacactattagcctaaacctgcaatatcagagtttttgtggtttgaccaagccttttatcctctttcccttacagtaagttctttcccagaaagaaaatatcagcccacatgcaaatatatcttataaatatgtaggttgtgtcctgatgtagcagaatatcataaatgaacacagcacatatagctattcgatttgttctttcttcaaaactcaaaatggagaatctccactgtagtgtctaggagaaagcaaagattagttaggtaatgaggatgtcaatgtcattcaagtggcaattactctggaatattccttgaaataacagttactgcttacttaacagttattgcttatactttttgttctcatcttctcaagtattccttacaaccactaagaactaaaggggtagataactcactaaatttactgaagagtcattggattggcttcaaggtactattgattattgtcagtgaaacaagacgcaatgatgcagttgctcagagggctcttttcttcacatgtaagtaagattcctccagcagtggatcaccttagtgatcccttagtgaaaaattgtcgaatccttagctgtcccaacaagaatcaacatatacacaattcagtttgcatcttcattttatacatgtaactttaggttatggctatcatatctgttttttttttttttcagccactaaaactgtagagttgaatatttaatggaaaacagatggtgcttgaaatctctaacttacatttaacaaaagctgttttggaaatgttgcttatgtatacttttttattgctttaaacacagcaccgttttagcctgttccgatgaattatttaagaattaactgtcccagtctaagacagcatttcaaagtgcaagtgttaatcataacttgattaaacatttccttccttttcttttcagcattccagttggcttttgagtggatacgtgcagtgagatcattgacactggaaacactagttcccattttaattacttaaaacaccacgatgaaaagaaatacctgtgatttgctttctcggagcaaaagtgtaagtaacttttgttttcatctattttctaaacacatgtacatataacattttagttttggttttggattttaatgctatgctatcatgattaggcttgtgggaaacgtttagtcaactttcagttctctgactgtacacagcttattaacaaacaaagactagtttgtctgtgtgacctgttagcatttgatgagaattctttcagctagtttatatcttaccattcattcatatacgtctacaagcctgatgttgaacactctaatttttgagtgcatgcagaaaatatatgattaaaagtcaaaatatagggaatttatgtcttgaatatgaaaccttctgggcaagtctaaaagcataaattatacttatgttattagttacttcaaccagtcacattctgaaagttcttcccttctatgagctttctaccctggcatatatctctaatttcttcttttaatctttttttaaaaacattttaaattgaacatcctcagggctctactgaaggttaaaccttatttccaattatgtagtgttcttaaggtaccacagtcatgatactttttaaatttatattagtgtatggaaaaaagcaaatagagcaactcaaagaaagccacacaaggaaaggatgaaagcagactattaatttccatcaagcaagcgctaagaacacatccctttgttcatttacccaagggggataaggcatccaaacagatgtacttgtgacgtaggaacattaatttgaaggcatcagaaaaaccacaaatgcaaacacatttctctagtatgggaacactttgtgttataaccagtgattctattgtggtggcccaaggccatctttcattctttctatggagttaccatccagcttttaagggtgaggcatgagtatgtgcagataaagtatagtatgcccaactgtgtttgttaaaaaatgaggatatgctgagagatatgccaatcctttgactgaataccgtgtttaataaccaaccaagtaaattcaacaaactctgaggaattgttcaaatttatgtgttttactggttggtgtttggttgtatggattattgcataaaagaaggggccatggatttgagcctggaattccttttatcatcatacaaagtcactcactgtaataggaggtgacctgcatacaaactaccaaactgcaaacacatctttctcttactgagttttcttattataaattaaatatgaaagcaaactattcatataatgttttctgttattgaatttcagagacatgagatctgaaaaaaaaatgtgtaaaggcaaaagggaggatattttgaataattacaaatgtcattaaacatttccctattcttggaggaaaacattgtaaaagcaaatgattaactgagcggtgactttaaggaactgagactacttaatgatgctaggagacttcctatttgtatttgtttaatgcaaaaaattttatcttggtggaaaggctcaagctttccagattaagagaacctgagttgcctacatttgtcaaaatgtaaacagtagaactctcatttcactgcttcctagcttcttgagaatccactggcataaagaaaatgcttccacttaattaaatgactctaagcagaagttaatgtttatcagaaaaaaagagccagacttattgcctagttagaagttgtcactttagggctataaaattttattttgctctggtctgagcatataaccctccaacgcttacgtttttgccataatataatccaaaattgtatacttagaggtagatttttcctggttttgatgaagaaagtttaaagaattagttctctttagaatctgaggatgtttatctttggcattctgacatttggaaatccaaagaaaatgttcgaaatttaaaacagtctctgttcctccctacatgcctctcttgtaggtcttgcatctttcattgtgaaaatttaaggcatacaaaagaggtagaaaaaagatcatccttaaacgatcaccttacttagtgagttcctctcatgagaggggttccagtgtgtcttggaagaccatttagtcactcttcaactcaaacaattcaggcataagatgggtggttaaactatgtgagtgttctgtttcctaccagttatgaatttctatgattctataccatgttgtgctcattcgtaagttgaatcaaagaccagttcccaaataaatataaaatcaaggcatcagggcaaacagagtatattaatcagcttgggctacaatataccatagactaggtggcttaaacagaaaagtattttatcacaattctgcaggctgggaagttcaagatcaaaatgccaaccaattttgttcctggtaagctctctcgtcctggtttgctgatggcttgccgaaagctactttttccctgggtcctcacatggcagagagagaaagcaagatctctgctgctgcttcttttaaggtcactaatcccatcattagggccccaccttcatgaattcatctaacactaattacctcccaaagaccccacctccaaaaaccatcacattgggggttagggcttcaacaaatgtatttcagggggacacaaacatttggtccataagagagtttgatattcttttttttttttttttctgagacggagtcttgctctgttgcctaggctggagcgcagtggcgcgatctcggctcactgcaagctccgcctccctggttcacgccattctcctgcctcagcctcccgagtagcagggactacacgtgcccgccaccacgctcggctaatttttttggcatttttagtagagacagggtttcaccatgttagccaggatggtctcaatctcccgacctcgtgatccgcccgcctcggcttcccaaagtgctgggattacaggcatgagccacggcgctggagtgcaatgccgggatctcagctcactgcaacctctgcctcccaagttcaagccattctcctgtctcagcctcctgagtagctgggattagaggcatgcgccatcacacctggctaattttgtcttattagtagagacagggtttcaccatgttggtcaggctggtctcaggtgaatttgatattcttaagggatgattgatttaataagtcactgtcttgtttaagcccaaagggtagtgactagtataatggaatctgtatgttttcccaatttggtaacactgaaaatgatctggtcaacatctttctcttcatttcttattttctaaattttatgttagggacattcttaccaatgatttttgaagtctaataatcacttcatagacctagaagctaattttaattttactgaaaatgattttcccctttcttcactattcttagtttgcttattttatattgttctttcttaacatctaatccaatgacaggtctctgaagtatcttgtcctatcaatggatttactatttaacttttcagatgtttatatatttcagaactgactatctcagttacccttcttccctctgctaatgcctgctttcttactggcttttagctaatcaggggagggaaggaaaggtacagacaagagaacaggatataaaaatttttgttgtaattatatattttaaaatcaggagttaaagtaaaaattttagcattttcttttctttataatatccctgttattctccaaactcatgaagttttataaatcttctcatctggagaataaactagataaattttaattcttattcattaataaattttcttgtgtattaaattctaaactttcttgtagtcttttgcattaaattcccaattttctagtacactgaatcattttcttcctaccagtttgaagatattcaagatgtcatctacttaattggatttgttaattttcttgatgaaattgccctttatttgacttaggattcttatggatgttctacttttggataaatttgtcactcaccagatgtctttgatgttccttgttcttttttgatagaattgttgttcagtgttcattcaaaactggaagcaactccttggtgtttggaagacatagggtatctggcacattctttcataatgaatttaaagcccacctaaataggctgtcagttttgagtctgggggctaggagcccatctggtgaaatttttcccagtaggctccctagaatattgcttattttcatggaagactttaaaaaattgtacaaacttggtaaactaaagtgattttattcttaagaaaatatatatttttttccatctgtacctttacattgctgagtttttagaagcagtcactcacctaatgacccagggtgagttatttatgccattttatctgcattttttagtgtcttcctggagtgggcagccaaaaaataaatttagaaaagatggtacattttgttatggcacttcagagctatctgcattcatttttcctcacaattaccctgtaagatagagtattttttatttgtatggttaaagtaaaaataacaaattccttcctagatgggcttcaattctctactatattcaaccccacctaagctacgagattgacaaagctgttgcagcttagaatcctaataaagttaaggatgtataaactgatttttttcactggtattcactcagcagggtccaagaaggtcacgggagatgctgtaggtaaaatcctttgaaaagcacaaaatacaaaacaaaaccaagttcctgcttgtgtctttattcacaacaaattgatatgagaagttgtagttttagagatttcactcctttggtccttatacctgccttccagcttgttctccttctttacaaagttctacaaatatttactgaatggctactgtgtgttaggctctgagtatccaatgtaagatacatgttctctctaccctcatagagcatatctgataactaaatttataatttttacaatttgttaaaattatttcaccaccctgtctccctaaccctgatcacctaactgtatcccattttaatctttaattctttttaggaaggctgaagttctgtatctctctgaagtctctctgtatttgcacttcatcacgttgtgggcaccctgtttagtagggatattttgagctgtgaataatgtgctataattgacaattatgctcattgttgcagaaacatagattatttcagagtagataaaaagaatttttctcagataatcaacaatagtataagaatagccaagagtataaataaatgtgagaatgacaggaaaggtctgaaagaacagcgactgatcagcaaccatttgctttaaatcaatcacatgtcacatgactgttttagtggccaaagccaatcattaaattgtcatcttggaaaaagttccacttttttctgtactgtgatgtgtttgctatttcatttttggacaatttcaagttgaagttgaattacaaatgattacgtccaagaaataattgcatatattgtacttaccagtgtaaacaccacagatacaaaaaaatggagagaaatcttgttgcattgttaatgaatattaaaaaattattcttacagacaaaatctctctataacaaagtgaaattttgaagaaaagcataactggtggagttttctatcagtagtatttgctctagaaaaatgtttataatggctgcttatttttaactgaaggtaattttcttttaaaattttgtttagctttttttcactattgaaatggcaaatgttttgaaaactaaaaaattgacttcaattaaaattattagtgtgtttacattgtttcccatggtcagcactttcaagggcagaactggaattgtccctgagttatagttctggctttgcatctgtgcatctatgtcttggtagaagaagtgggagtaagagaaccataagtaattagttttattatcaaatgcttccaatagcttgcataatttttttcaagggtaaaatgagaaaaacagcattgaaatcacattaaaaaataaagcaaacaaaaaatccaaaccaaatcatcaagcagaaatcattttaaaaatgctatacaataatcaattgtgttcaatacttctgcgccaaaacctttaagtcttaaagctttcctaaatggaattagtccatcaataagcagataacaactttacttttattgttgaaaaatgtcactcttgtcagttcacaagtttccctaacttgtgcaaattaaaagccatgacagcaaggccaagaatggttcgttggtatatagttagagagaccctgaccctgctttcttgttcttcctattacccaggatatgtcatacgccacacacatgggggtagggataccgccctacttatagcataagaactgagaataagacatttagcttataactcttttatggtaatattcccctcccactgccattcttcctactcaggtagtctggacttctgttttggcaatattgcttccgtgagaaggatttgactgtacttgcagccctcaacatcctgaatttaatacaatctacgatatttgttaagccctcaccaactatttgaccaaactatgacagttacatcccacggaactgtataccaaatggtaccccagcagttcagagagttaacacaccaccaattcacttccaggttgggctttaagattttcagaggatcttgcttatgaaatcatattggcttttagataaatgtattaaaattactgaaaacaaatgataacaccacagtaccacaacctaaacaatcctttctataaattaatttaaaacaagaaacaacaagctttaaatgtcatcatctctgcttattgtatgtccttaaaaatattattaaatgtccaacttttatttttctagaagaggtcattatatagcattgatttgccagcagggttctatttgaacataccaagagacctagacattgctcagaaacagtagtctcaaaataaacaagggattggaggaaaagatgagagatctccagtatgtctgcatataagggctgaaaaagtaaaagtttccaattgtttttttttctttgcaagtgctcatgcagggattcagaacatgcattcctcacccaacataaatgaaataattggcaagtagtcaaagaagaccatatccttgagtgggtagtattgttgtctatttggaaagcatttacatgttttgatttcctgaaacaatgctgaaaatgtcctaatgcaggaagggagaattgaaaacaaccaccataaaatgcaattagatgttggtaaaagtgactcagaatagacgtaagttaaaactttctgacagggttttctagcactgggacagtattttttgaggaaattataaaatggtcttatttcaagatcttttaacaatctgatgaaatatttatggttctttaaatttgtattgttagtatcatactctgaattataaaacatttaaacattttagtttataatctttaacttctcactattatatttataaatgtgtatataatttgtgcatatgtagacattcatgaggaagatgaacatatatgttaattggcatctgctcatttaaaactaaagttgtatactttcattacagtaatacacgtcattcattaaattatcttgtggcttagctttacaaattcttaccgttacatgactttgggtgaatgacctcaccggtgtctatatcactcatgtgtaacatgagaggagtagattaaataaacgaaaagatttctttcaactccaaagctatgacaatgtattttcaagattgtgtacttcttagaacaggctcaataataatttttcacattatgaactttgcagtcaaagaataggttcttcttaacctaacaaatgactatcctttccacccaaagtataaacaggatcctgattaataaattgagttcaaagaatctctgccaagtatgcaaaatcactgcctctgtttgtcggacattcattgcctctaagaattgatggaattgaaaataacctcattttactgggacctcagagaattaattatttaaattttttgctgctttaaacattaattttcttaatttacccatatatgttgctgataagagctgtaatattttgaatggttgtgctttgaagaaatctgaatccttttgctttgtattccaatgacagcagctttgaccagcgaccagctctcttctgaaaactaccattttgacccctgcatttcacctgttgtcccaccaagcctgtctgtttttccattaacagagacctctgaattgttgtgccaaatgtggacagtgttgtttcttcctcactttcctgaattataaccagttccaggcggtaacatgcaaccgaactttactgagtcctggacataatgggaaaaaatcatagtgtagaaagaaaactataggactgaatataaaaaaataatcatttctggcattacaggacaaacccagtcctttctgcttagttactgacctaccccctgttgctttgcttatcttcccacagtgaaatgtctttcttcttatatcctacatggtttccaggccctttactccaggaaagccaggagaaacgccttattccaagttcaagtaaacataataatttacaaagatacaactctgcccacaacaaaaaactccttttacagcgttatgcaaaggcatttagactggaacatctatgttccagacacagaccttaaccagtcttttgtcaaactaaaagagcaatctttcctcaaagctggaataacaccttttcttttaaaataacatttcgtgtctcacactcccagatgttttcatttaagactttagaaaatactgggatcagttatcagccaagagtacccccattctaataaaaatatttaaagacatggaaaaatcaatgaatccaaacaatcatcatcctcaccaaacccttatcatttctataactcacagtaaataatctcaagttctttattttggtaaattaagaaattccagagtaaactctctagcttctgatttaagctcagagatgcagagagcttcagagtgtcgttctcattcttaccataaggaaaaatctatacaaactacctattcattaatttaaaaaaaagcaccagcaaatttaggtcgtagggcaaccaaacaactccaaatctggaaagagacaggcacctgcaagaagaaagaggatggcatcatttgtttttccttgggtagacaccaccagatgtcatgtaaaccagcaagatgattcagctaaacattttaatgaattgctaaggctgagtatgggctagcatgaaaatgtgacacactggaggtggcagatatagggagtgcatcctatagcaggcttttcctccacaaaccccaccaggcactcacaggaaagactggggagaacagcagccaccttcaaacccacaaccatttcccagtggaacaaaagagttaattggcaaagagaatagcaaaaatcattgtcttagggaactggaggaaacccattggtgatggtggcagtaggaagaatgatcgtggtgaggggaagagaaaaaagtaatgctctatccccaggggtggggtatggaatatatgctaggatttgcacaacaattggagaaagttgcaggagcacttgtgaaggccacattgctgatacagaggtacacattacctacctaagactgagtcttaatcagaacatcaaggaatgcccttcctccctggcctgctaccaacagcctaacaagtgttgagtaaaaataatatgggaatatggttgaatatggaagaaattcaagagacacattctctttagggcccagcattaagggaagacccaaagctaaagggggagcaaatattaagaaaataacaactggcaagccatttcacaatctattcctctttaagaatccaaaagtatctatctcagtatctactgtcctacacaagatatccggctttcagcaaaatattatgaccatatgaaaaggcaagagaaagcactccgaagagataatacacataaacatgtgatatatgggacacatataaaaattatcacacaaggaatttaaagtaactatgattaatattttaaaggttctaaaggaaaaggttgaccacatgtgagatcagataggtaatttcagaggagatatggaaactaagaaaaatcaaatggaaatgctagaaattaaaaacatagtcaaagagattaaaaaatgtctttgggcttgttagtagacgtgagacagctaaggaaataatcactggacttgaaaataagtcagtagaaattacccaaacagaaaaaagagtggaaataaaagggagaaagaaagaacataacagagcatccaagaactctggtacaatattaagtggcatgacatatccataattgaaatgacagaaggagaggaaagagaaaaagaggcagaagaaatgtttgaagaaaaaaatcgctgaaaaaatttccaaaattgatgatggacaccaaatcacagactcaaaatctccaagtatatcaagcaagatatataccaaaataaacacacacgtgcagagtcatgttatattgaaattgctaaaaatcaacaacatagagaaaaccttaaaggcaaccagagggagggaatgataaattacctaaagagaagtaaggataagaattacagcaaatttctcctcagaaatgttgtgagcaagaagaaaaaggaatgacatctttaaagtattgaaagaaaaacaaaacccagtaacccagaattctatgcccaataataatacagttaaaacaggaatttaaatttttctgactgaactttttaggttcctattctgtctgatgtccccaaagtaatatgcacctatatcctcattttattttgtctttcctttttcaaatctgagagggtaaagctgtttcttctattcaagaccaacacctctattgcctcagagggttagtcaattgcctcctccctctataggctcaattgcaatttagctaatctctcttctatttctcctttttaccttagtttatgaactagaccatccagtcctttctgtcactcccgtccatgtatatctcttttgacaattctagtatttatatttttctttctagtagttattgctatttccttctgagactgcatgttccttaaacaatgctgttccccaagattcagtcattggcccatgtaatattttaaggtatgaagacacctgaaagatcataagatatctcctttcatgtcttaactatcttctatttgattatctctcaatttccatatttagttcccatttctacttttagtcacagaactctaaccaagtgcttgctggacattcataacatctacacaacatttcccaaactagatgcatccattattcttcctcatctttaaacatactgctacatatcctaaatattttctattatatttactgcctcagctatccagttgcctaaggcagagccctgggaaccttcctcagctccagactcatcatccctcccaacatctaaacaagcaacaagtgttactgcatgtatttgtgggcacatatttctgagtcctcatctcagcttgacttccctttccaccaatgccctggggatcaccttattttttctccccaagatggttctcattaaaatataccacagtagtgataagtagtaaaattatatatggaagctgctgactgttgctccattagctgtttctgtggcaactctattttttcctattaatagtgtactaagtgttttgaatctatgtcttttcacaacttcttttgattacagtttaagatagcctttaaatactaaattcatattaaggtggatctgattgtgtgtgtgtgtgtgtgtaatttctgttacagccatcattcataattcattatttgtgaggaataattatagcaaagactgattagatgaaatgttagattatttattataccagattcgaatggaattaaagtctaatatatgtgttaatgtgactaataagaataacaataataatttagaattgcaaaatgcttttaagtttccatatactattacaacattttcttgtttttttcctttataaaaacttacaggtaggaaaggcagttatatttatcctcattttatgagccttagacagattaggtgagttagccaagatgcacaactagtaatggtgaatcctagatatacttcagttcttctgattccaaattccttactttggacactaaaccttggagccacacaaatgtaactgtaggcatcacttatgtactaatgtacctgttacaccatgtgcctactggagagaaactgtaacatatttatagtcaattatctatatttatagctatcctcacagttggataacaatgttatattgtaaactctagatacttttgcactctatgacagaaagtggattttttgtttaggaagacattttaattatgaatggaggcttgttggggatccctattagcctttgttaaatcacaaggaaggtaaactcttttgcataataaagtattaggatttttaaacttgtcccctgactgctcaagagatgaagtttggggagcggcagtactttggaggactctggtaagtgaatagatataagaaagttctgcagggatagagccacatggcagcagacagggcttaggaagagggactaccaattgtccctgtagcaaagatggcctggttaaagcctctttagaatgaatgagttctagtaaccagttttaaagatttgtctgtttcttttctcccctcaaccctttctttaaactttctgtaatcacaacagcattgtaacaattttgcctcaagctgggaagagaagggctgtgttcctcctagagacaaaacagggaagaaaggtagcaggggcagagtgaaagcaatgattgctgtggaattggaacaactgtgcagaggaagctgtgacaaataattagggttggtgaagcacctgtccctttggaggtatttcccagaaatactgggaagggctctaaatgtcccattgttatgtggggagatggttttgtttattgtattgcccacagaagtctgaatacgttcaaatattttgcatatttgtgtgtgtgtgtgtgtgtgtgtgtgtgtgtgtgtattgaagtacttggcataaggttatgctatttcaaattaacttataaagtaatttggttgatgcaatattctgtgatcaaaatttattgaggacctcaccaaatgccaacatgtgtgtgtatatatatatattatattatatatataatataatatatatatattcactcatttagttctcaaaactattctatgacactaatattttatgtaacttttctatgatacgattattattcctattttttggataaacaaactaaagtacacaaaggagccaatacttacgtctaaaatacctaaaacatacatatttgaaataagagaatatgaggaaaaagtctcaaaattttatgtaggttttaataataaaattgaaaagtcgaatcattttaaaaccttaaagttagtatatggaaatatttggctcaagagtgaactttagacctcttgtctggatatgagtatggaatacattattcagtttcttttttataactttaaatagcttgtaagaagacacctatgcaaatagcaatttctccaagataagtggccatacaggccttatgaccttttgaacatgtcttcccaaatacttcatttctgattagaggatggtcattcagatttcactggatttaaatccacagtgggataggttttaatcctttctggaaaaaatatttataaagcctatgtgagtttcagaatagtaagagcttttattctgtctctccttggatgtgttaacccttccttctacctcagatccatgcatttctctaagttttatactttgtttaaattgagctttcattgtttctatgaccaattttcaatttgtctctactttgcacttcagtagaactaagatgaattctgaaaacgcacaacagccttcatcaatggtccctttctgtaaagagtatctctccccgtacatattcagaacagtataattttaggaatcaactgtatctacctagaaatatgttttatttctctctgtctccaaaaacaattgaaattctctcatatggtttattgccttgcatttacaaaggagccacaaagttcgatttgtgtatactatttttgcttaactagctatctggctgatgtgcacatcaacaaatgacaatgtagtcattccatctttggtacatggagtattatttgataaaaattccactatattttaacttctgaaagtaaggtgattttgaagtatctagaagatagtttctttatttcaacaatcataaccctgtgctgccagatacatattttgatcccaaacttgaaaatatttcaatggttagattattatgcttttcatctgacagattttatggtttaccattttcacttaagctttcccagctttttctcctctttaaaagtaaactattggaagtttcatcatttccattatcaatactagaaattaaagagtcagagatatatgtattctcagaattgtctgaagagtttattgtaatttaataagatgttctcttctgttgtttcatctattatgtcattacatatcatctatgtcattatcgtgtttctcttcatgatttttctggatcactttaatgctctaatcaagtgctctttattttgtgtacagaggcctcattatgataatactatataaaacatttgtatgatgcttttcagtttacaaagtcctcttaaaaaacattaccttatttgcaactcataacaaccttgtacattaggctgtgttattattattattatctgtagacaagaaaacacttttatcaggtaatggagaggcatttaaatggaagattttcaaatccttacctgagatctgttcactcttttccttcttttttagtttgttcccttttactctgtatccttggaattatgtagatctatagtgaaaggctagcctatcagttgctagccattactttaccaagctgagccttatttgactcatcccaagtaatataggtgataatgactacatcataggattgttatgaaaactaagtgagacaaagcacgttaaagtgtctaacacagtaccattttatccatccatatgccatatggtggcataatattctaggttggctattccttaatgctatgtaaattttctttcttctgaaattaaaataattataatacttaatccaaattagactctaaaaaggtcatggtcagtataatttatgaggtaaaaatggcatcaaaaaagaaagaaaaatgcagagtacagagtaaaaactgagccattttctgggaactgttgtgaaattgagtttcttaggcttttcatgtcgataatgcaaactaaatataatttgcaggtccacaaaaagtaaaatgatataaaattatgctaaaatcaagaagaatggaaattaatggatttaaaaaattattgttattgcattctctcaattttttaagactctgtctctgcagtaataaagggaacagagggaaaagtgggattccaaaatagtttatttagacttggaatgcttgcatgcttatatctcactcaacatgaatacgtcttaactaatggggacttaatgaaaactttatattattattaattgattgtggattaataaatgaattaaaaatggggttagaaatagtgcgttatttcttcatctcttgcctttattcagcttttctctttgtccattctacagtaggaatgaattctatctcatagatagatttagaaaccaactccagcaaaaaaattgttgtgctctttgtgagggaagaggttagattaggatgaattaaatatttcagttgaaaaaaatctgagcaaattcatttaagatattttgaaaactcctaaacagtatataaatatatgaaagtttaaacaataataaacagtggaggtacatcttttgtgttgtaaaaaatgtagttgatctttttctttaatgtttccttatttttgtgttttgcttagtgaggcttttctactgcaagattatggataattttgcccatgtttttgaacattcttatggtttttctcttttcccctaaccttgacaaacaaacttcctttcaaatgtcctagatgcttcagggatagctatttgaaatagttcttggagattaataattctccatggcaagctgtcttatccgtattctggtaggttatcttatagaagaggaaaagaaggcaaaatcctagagttaaaaaatacaataaacaaaatgaaaaaagtagtaataacaagtacaacaacaagagctctagtggtatactgagaaacaactgcattcttttgttcttttttcttattttcaatcattatgttgcatgaggtacagccatatgaataaatatgtactaacacatacctagacatacacaatcagccctcatattcatgatttctgcatctgtggtttcagtcaattgcaaatctaaaatacttttttaatcatctgtagtaagcatgtagagactttccttgtcattatttcctaaaaaaatacagtgtaactatttacatagtatttacattgtattagataatgtaagtaatcttgaggtggtttaaagtacacaagaggatgtgcgtaggttacatgcaaatactatgccattttgtatcagggacatgagcatccgtggtattcactggaagttgtgaaaccaatctcccacggataccaagggacaactatatacatatatgtggctatgcggcctacctactcagaagagggttcacagaagaaggggcagcatggagagattcataatgtcttgtgagggagaggggagcctacagtggaatggttagttagaaaatagccaataacttatttccagtgaggaattagaaaacagggattatggaattggaaaaactgaggcattaaaagtcttcctcctgaaattactatgccaagtggaaaatctgctctgaacccctatccaggaaaacattcttcttcaaaagatgttacttttaactttgataagtcttgattagctcttttgggttttagctgttctttcactatgtccacactttacttatcaatattaataaatcttgttatagccagagtggtttgcaacctaaagtagaaaatatctatatctcagggctttgtacctgattgcacaggtagcaatcccaggctaagagtaccccttaatgctgcaatggccacagtagtcttggacagggggatcatgccagtaggtctgcccagaatctctggatagatttattgttgaagaccattcctagacaaatccattctgtaaagactggaataagtatttacttctttagatgtgcagatattgatacatgtcctcaaacatcagatataatcagggaaacatgatgacaccaaatggacagaataaagcaccagtgattgaccttaaagagatggagatgcatgaacttcctgacagagaattcaaaataactgtttgagaaagctcagtgaatgttgagaaaagacagataaacaatttcttttaaaaaaggagaacattaagtgacccacaatgagaaacagaaaaattgaaataacaatttttaaaattaaacagaaatcctagagctaaaatatacaatgaacaaaatgaaaatgaaatagcatcaacagcagacttgatcaagcagaaaaagaatctgtaaacttaaacacagggttatttgaaaatacacagttcaggccgaggcgggcggatcacgaggtcaggagatcgagaccatcctggctaacacggtgaaaccccgtctctactaaaaatacaaaaaattagccgggcgaggtggcgggcgcctgtagtcccagctactcgggaggctgaggcaggagaatggcgtgaaccccagggggcggagcctgcagtgagccgagattgctccactgcactccagcctgggcgacagcgagactccgtctcaaaaaaaaaaaaaaaaaaaaagaaaatacacagttcaaggagaggaaagaatgaaaggaaggaagaaagcatatgagatttatgtgacagcatcaaaaaacaaatgtttgagtcattggtgtcaagaagaagaaaaaaacaaaggagtagaaagtttgtttgaagaaataaaatcagaaaactttccaaatctggagaaagaaataagtattcaggtcaggaaggtcaaagatttccaatcagattcagttaaaataagactattcaatacatattacgataaaattctcaaaaatcaaagacaaagagagggtcctgaaagcaacaagagaaaataagcatacaacacataagggcattttaatatgtctatcagcaaacttctcagcagaaaccttacagatcaggagggacttggtgatatattaaaagtgctgaaggaaaaaaaaaatgccagccaagaatgctatacacagaaaagccatcttttagaaataaatactttcccagaaaatcaaaagctgaagaagtttatcattgccagacctgtgttaaaaaaaatgcttaatggagttcttcaagctggaataaaagaatgctaataatacaaaaacatgtgttaatgctagtaacacaaaacatctataaatataaaactcattggtaaaagtacatagtcaaatttagaatactctaatattgtaatggtggtgtttaaatcacttatatctttagaagaaaggttaaaagactaaattagtaaaaataataactacaataatttgttacaggacatgcagtataataagatgtaaattgtgacaccaaaattcaaaatgtgtttgggagaatgaggtaaaagtttagagttttttaatttttattttgcaatccatgttaagttgttatcagcttaaaataacctgttaaaagtaaaagtgtcttttataagcctcatgataactacaatggaaaaataacttgttaaaattatggaaacctcgtctctactaagaatacaaaaaattagacaggcgtggtggcgggcgcctgtagtcccagctactcagaaggctgaggcaggagaatggcgtgaacccagaaggtggagcttgcagggagctgagatcgtgccactgcactccagcctgggcgacagagcaagactcagtctcaaataaataaataaataaattttataaagtgttttttataagcctcatggtaactacaaaggaagaccctattattggtacacacaacacaaaatgcaaggaatcagaatacactactagagaaaatcacttaaccacaaagaagggcagtaagagagaaataaacaaagactctacaaaacaactagaaaacagtgaacaaaatagcagtagtaagttcttacccataaataagccctgaatgtaaatggattaaattctgcaatcaaaagacagaaaaatagatttaaaaaaaagacccaatcatattctgccctcaagggacccacttcacctgtaagtacacacatagatcaaaggttaaatgttattatattatatataattatctataatataaaaacatatttatatataataatgttatacagatataaaattgaacacacaaataaatagaaagatatttcatgttcatggattcaaataatcaatactgttaaaatttccataataccccaaatgatctacagtttcagtgcaatccctaccaaaatattaatgacatcctgcatagaagtaaagaaattttaaaattaatattagaattataaaaaacctgaatagccaaagtattattgagcagaaagcacaaagctggaggcatcacactacctgacttcaaaatactctacaaagctaaattagcctaagcagcgtgatatcagcataaaaacaaacaaacagatagaccaatggaacagaatacagagcctggaaataaattcacacatttgtagccaactgagttttgtcaaaagtgccaagaacacacaatggtgaaagggcagtccatgtttattgcagcactatttttatgatagccaagatatggaatcacctcaatcatccatgcaacaacatggatgaacctggagaacctcatgttaggttaaataagccaggcacaaaaagagaaacactgtatgaccacactcatatagaatctaaaatcattgatctcatagaaataaagaagtaaatggtagagaggctagacaggttgggggagggggcttggacaaatggtcaaaggatacaaaattttagataggaggaataaattcaagagatttatttctgagcatggtgactacagttaatggcaatatattgtattattgagaaatgctaggaaagcgggtattaaatgctctcccacaaagcgataactatgtaagttgatgcatatgttaattagctagatttaactattccacaatgtagaatacttcaaaacatcattttgtatttgataaatgcatacttaattgacagaatgtcaattaagaaacaaaacaaaaccagctcatgtcctcctgcaatgatttaggaatcccagaataattaatagagccaaaatttccatcacattttccttgactgccagttccatgttggctatatcattctgtgagcaagttttcattttttaacatttagtatgtttactcagtaatcaacatatttgcttataagtagtgacacagatattcagccgcatatatttttctaaactggtatcctcttgtttctgcaccatttattgaaaaaatccatctttttttctagaagtatgagtttttgattgcttaaatagaatggaaggagaaaaggaaaataattaactttcagatttcactaggttttgggtttttgcaacataaggagtattccacttagacttctggaaaatttctatttttaatccaggtttatttgttgaccagtgcctttgaatagttttcccgttagttgtaaataaaggatttctttactctgtgtccttggttttcctctttacctgatatttagaattattattgataatttagtaataattttatcattaatatcccaatctattgcttgatttgtcatcatattgagagtttgagaagaatttatttttattaaattattttccttaaaaacaaagtgttataaaagagagggttaatagaacaaaatgaagaataaatagctattaagaggctaagtggtattaaagacagctctgtggcattttgaggttaacatatttaaatgatacattcattcctagacagatagatcagcatttaccagatggtttctgctagaatgctctcctctccaatatcatcatctcatttgtggtgtgtacagatttccagaaagtcaatggggatgtcctggggctagtgggccaggcttcttcttttcatttgtattcaaagccaatattttctttccaaatcttgcccctttcttgtttaactcaaggcttggcgtggtaggggaggttgggaatggtgagaaatagtgcctccttgaatgaaaggttggaggaaataagtttacagacttggcagtgctagttaagggcacaccccataaagaagtctcaatatggttaactagtttccagagcagtgctacaactgagccttgtgcatccctgaagtgatgagcacaagtatgataatcatcggaagagaacatatattgtataatttggaatcagccagttatttgtcagactacctttgctgtctgtaggatcagacacacatgtgcctctgcatttgggtaaatgtaaaaccacatttcctattataaagaggaaagactgctggaaacagctgctctggaaaccaagttgctcagaggaagtgagctaaacttgtgtttagctaaatggtgtgtagctaaacctacccagtgaaaaaaatatgtagaaatggactcaataactttctcaagagatgaaaatatagagtaataaataggcaagaaaatagggatagaaatggaaaaagtggagagagaataacaatgggaaagggaaagaggaaacacgcttatgtgttgtagtgactgaccaacgcagtttatgaaacaacatagctagctcaggagttagcccaggctttcaattaaaaagagatgcataagcccatatacctctttttctttccctcaaaatgaccttgagttttagtttggtagggttttggtacagctgttatttgataatatcacattgtgcttttcaattaacttagattgtttaaaaaacagataactgaaaaccatctgtttgtggttctgtgtaatttgttctcaggacagggactaggaatgaaccattttaaattctgctaatgaaacctctcattaatttaaggagttctacaaactaagtctgtggtaccaggtagaaggggtgccaagtgttgggctttctgggataagggaaaattaatttcttcctttgccatttgtggttgggtagcatcttttttttttcttcctggcagcgagtctcataatttaatatgcattaacataatcaggaatgattgcttaaaatacatgttcttgaagtttatcccaagagatttttgattcagtatctctgggaagggctccaggaattgccacagttaaacaagctccccaggtcattctgatgtagatggtctgaaggccacactgactaatgctgccttttagaattgggaggtaagtttggattttgtagatcaaatattactaccaagaataaaagaaatacacaaaacctccaaacaactcaaatgatgtaacaacaaagcaaatggctcaaagcaaacaaaacccaacaaaaggttttaaataggtccttagagatacaatgtaatttgtctcagctgcggagacttaaagaggccaactcttagttgacatggaagaatagggacaacattgccaagaaacatggttaatttcagttatggataccaaaccctgggctctggaaagcattaacaattttacccactatgctaatcttccatatatggggcatgctggataaatctattttgctaacgtctcttttacaataatgtacttaattttgttgggtatatattctaatttgtgttttctaattcaagttctaacttttaaagaggcccccacccccactgttttccctcgagcttattaaagggcataatatcactttcctcttgttaagagtaaagattggaagaatttagttatcagaaaatggtggtaggttgatgcttttggtggtggacgcagcagtctgatgaataagcatctttcttgaagaccagggttctgccactaaagatgtatgtgatttctagaaaaataattttacctcattgcatctcagttttctcctttgtaaaatagggatagtggtaagtgaatgatttctgtgatcctctctaatgctaaatagaatgagaatgtgcgaagcctttgttatctcagtaaactttaccacaattcatctgtaacgacaaaatgttattattagaaacatattaaaaagcttgcaagtggcatgaattcaggcactgtaaatgagtgtagtgcagtactgtgaaggtgaggggaaaatatgcatgtttcaatcatagggctacaagtttgcacagatctgaaaaattactgttgggtttcttcaactaggggatccagaatatcactgttattcatacctcttgccattaggtggggcagttgaagagtaggaagaccgttttcaagtgaaatgttgttttgcttgagtatgttgtttcatactcaacaacatctgaaagtaagtggtaaaatagacttccttttatatagtctaaactctcagtggccagattattagtttctttattaattctggatggtgaggaagaagggggacatgggtgataaagttaatgtaatgtaatattgcagattgtattattaatgtaaattcccatttggaactcaaaagccaaaatggatctgaagtcaacttatgcagtctactttttcagaagaacaattaaatagtatgaggtagagacaacaaaataccaggtttatggaacactagaaagtggaaaggagccatgagagttattgcggcccttctctcagtgtctattgatttcctttagcatctggggtacttaactatttccttctccttctactttcttttagaaaattctatgtcaattaatttatctgacatcttaatcgataattcattaagaaaatcttttgtgcccagcacatcatgatgaattttgatggctaatgttacctggtctctgttttgaagtgtttttattgacttataaatttaagatgttttcctagaattaaaaaaatgacatggaaaaacttcaaatcagtcttttataaggtagtgactttaaattttcatttgtcaatttccacatttaggacaaaaagtaagagatgtggagaggaagacaggaatactagggaaaaggtgagagaagaagtatttctggttacttctgttgtatattcttaaaagtaagagtccatagaaccatgatagtcaaagtactgaggaaacagcagatttggaaatttacatttcatatcaaagggattttctgtgagacaaaccaatgagatttgatagattagaaaggaaggactaataaagaaagcaactgaataaatacttgaataataaatgatatgtgtttttcacactctggtccagttatttttttttctcttttaaaaaaaattttgttagtgtttttgtgtgagatagttaaaagttcctgcaatccacagagctctatatttgattaattctggattcccagcaagtttgcatggcttttcagaggactacaaaatagggaaaagactaaattcaatatagaattgacccatgaaaatcacgggagttagtggtaccaacccctgtgcagctgaaaatctgtgtgtaatgtttgacttctcccaaaagttaactactaatagcctactgttcaccaaagtcaattaacacataatttttatgtttttgtattatataccgtattcttacaataaagtaagctagagaaaagaaaatgttattaagaaaatcataagaaagtgaaaatagatatttaccattcattaagtggaaatggatcatcataaaggccttcatcctcttcatcttcatgttgagtaggctgaggaggagaaagaagaggtcaggttgatcttgctgtctcaggggtggcagaggcagaagaaaatctgcatgtaagttggcctgtgcagttcaagcccatgttgtttaaggatcaactgtaaatcttttaacttttcaaatgacgctcattcacacaaagaaatttggaagtagacaggatttatatgcagctataattttaaatggcagccaacatcatgaacaaattctcctgacatctcattccttgatttctaagaagtcaatgcaagaggaaggtgagaatcaaatttgggcagctttgctcagctgaatattatatggtgatgattatgttaataattaaaatattgaaatatttatttagtacagtcattcaccatgtaacattttggtcagtgatggatggcctaccatggtagtttcataagattataatagagctgaaaaattcctattgtcagctctactgatatcacagccatcataaagttgtagcataacatattactcatatgtttatggtgatgcaggtgcaaacaaactcactgcatggccggtgatataaaaggatagtacatacagttatgtacagtacataatacttgatgacaagaattactgataataagtgttactgttaagtacttaatataatagattacgtccctgatttatgtatttactatactatactttttaatcattgttttagtgtgtactcctacttacaaaaaaaaaagttaaccataaaacaacttcaggaatgagtttcttgaggaggtgttccagaagaaggcattgctatcatagaagatgacagctccatgtgtgttattgcccctaaagaccttccagtgggacaagatgtggaggtagaagacagtgatgttgatgatccttatcctgtgtaggcctaggctaatgtatgggtttctgtcttagtttttaacaaaaaagtttaaaaagttaattttaaaaagctagaaaaaacttacagaataaggatataaagaaagaaaatattcttctacagttgtaaaatatgttggtgttttaagctgagcattattacaaaaagtcaaaaagcttaaagaaattaaaacgtttataaaataaacatgttacaataaactaaggttattattgaagaaagaaaatgtaaaaaataaatttagcacagcttggcctggcgcggtggctcacgcctgtaatcccagcactttgggaggccgaggcgggcggatcacgaggtcaggagatccagaccattctggctagcacggtgaaaccccgtctctactaaaaatatatatttaaaaaaattagccaggagtggtggcgggggcctgtggtcccagctgctctgaaggctgaggcaggagaatggcgtgaacccaggaggcggagcttgcagtgagccgagattgcgccactgcactccagcctgggcgacagggcgagactttgtctcaaaaaaataaataaaaaataaataaatttagcatagcttaagagtacagtgtttataaagtctacattagtagacagcaatgtcccaggcatactcaccactcactcattgactcacccagagcaacttccaatcttgtagcctccattcacggtaggtgttttctacaggtatatttttatcttttaccacatttttactgtatctttcctattttttatatgtttagatacacaaatacttaccattgtgttatgcttgcctgcagtattcagtacagtaacatggcatacaggtttatagcctaggagaaacaggctatacaatatagtctaggtgtgtgtgtgttaggctataccatctaggtttgtgtaggtatactctgtgatgttgacacaacaacgtaatcacttatgatggatatcttagaacatattttaattattaagtgacacatgactgtacttaatatgtattaggtaccaagctaagcatgcaattaactcatgcaatcctcacaataaccttatgaatttagtactatcaattagcaccatttttttccatgggaaataggatataggatattctatcacaagcataccctcaatgctagaggaaagaaagaaagagacgaagagggtgagaaagagagggaaggaaggaaggaaggaaggaaggaaggaagggaaagaaagggaaaggaaaagaaaaaagaaaaaagaaaagaaaagaatggttcattttctgtttgtatttaaataatatcacattattatttattgggaaaagctaactgagttgggagcagtgatgtaggttcgtaccaccattagttgaaatcattgcactatctgagaagaaagaccatgaaatctaggaagtttaagaagttagttttcgttagatccaaatactgttaatgttggctatcttttttggatcacaatttaagagaacagattcctttaaatgaattggttgaggaaatgaacagaatatttacaaatatttctccttaagtgatatttcattagggagaggtcttccttaatgcctgtctgaaatagcaccctcctcattctctaaatcttcacctgctttattttctctttgtagaacttaccacctgacacatttcacagtagtttgtttgtagactgtcttccctctctagcttcataggtacagggaatttctctgctctgttcactgataattttcttgtacctagaacactgcatggtacttagtagatgttcaataaatatttgaatgaatgaatgtataagtaaaataagaaaattcatgtggccaataggtaatttaaaatattctgctttgctaaaaaccaacagaagtaaaaataggtaaaagcaattagtattttcatctaccaacaatgatttaaacatattcaaaaagatatatacccaatgctcatgaaggtgaagcaaaacaaacattcttacaaaattgaaaaacactttgctggaaagtactttgtgaatatggtgtctttaaaaatgtttctatactatattttaattctattaatatattcaggaaagcaatccataattaaaaaatatcttttgctgcacaaaagtctttgcttcaacagtatttattgtagtgaaagaagttcaaaaaattctaagttccaaaggtaggggcacagttaaatgaattatgacaactctctttcatggtatattatataagcatcatgagttaggtttactaagagcttttttaatatgaaaaaaatgctaatgaaataaatttaatttgaaaaacagcataaacattggaataaatgacatcttaaaagcatacatagaaaaaatggtagaaattgtgccaaaatattaacagaaactagggcaggtaagattatgggtgattttgttttatacttctctatacttttatttttcaagtgttccagaatgaaacttttataatgaaaaaaagttttaaatattttaactgattttgtattatactagtgataatccagaagtgattatgttttatacaatagactatggctttatatgaagaaatgaatatagtctagtattgtttttattatctaggaatatacatgtaactgaagaatttatgagtaaagtttaatataagcaagtaactgggacttctggaggaaagctcactctaggggaagctctcaaatgtgttttcaatcttggattccagtcaaaaaaagacatgagttacttggatttaataaccagatatacattctcctcctttaggactagtgaaaaatgggcactgagtgagcttgggcacagactaataaaggatattcaaacacgataaacaaacagtagcgaggcccgagctacctgggcttagaaggcagcagggcccccagaaagtggtagtagcaacaattactgtggttttatcctgtggctagcccaggttccagacagaaagttcttcctggcctcttaccctagtaactctgaggactgtacccttgattcttggattgttagacacatttccacttctggctttggccctgcaaccctggtacctaaattgagcagcttgagcacacaagttcctcattctttcattatgtatgtccttgttaagagactgtgaaacatccagaatactagggcagcaagccaaagcacagcctctaataacaaggctttccattaatttgattcatttaatgaaaagctatgtgaactattgtaataggttcaagaacacaccttaattcttggactgttttttagacctttagaagtcgaaggcctctgaaattatatgagcttgggtgttgagatagaggaaacatgaaaatttattctacctgaacctctgcagttataaactagcatcgtataatttatttatttattaagtcaaggtttataagtcatttccacaaagcctagcacacagtgtctagcatatatagtagatgcttgataaatatctgtcaagtgaatttcaaatacttaaattttgttgttaatacattcatgtaatggagccatatcatctcatatgaatgattgaagaatacaaaaactccagacttgaatgcagaatatataaagaactagtacaaatcaataagaatgagacacacatcccattaggaaaatgagcaaaagacttaaacaagaagcccttcaccaaagaagaaatccaaatagtcaataagcatataaaaaggggctcaatctaatcattgaggaaaaccaaacccataattcaatacaagtacacaccacaaaaattgctacaataaaaaaagatagacaatgcctagtgttggcaagaatgtggagcaaccagaaccctcaatcacttcctgtgatagtgtgtattggtaattggcttgaaaaactctttggcagtatctactaaagctgaacaaatgcataacctatgacccagtaattctagtcctagatgtatctcaaacagaattgcatgcaacttttcataaaagactatacaagagtgtttcatggtaacaccagtattaacagacaaaagctggaaagtacccaatgcccatcaaagaaagaaccaactaataaattgtaatatattcacaagaacctaagaatacaactctaatactaatcagctgtgagaatgaatggatagcatgtagttgcaactacattttaaaagattaattaatctctcaacataaggttgccaggcacaaaagaatgcatactatatgattccatttaaacaaagtgcaaaaacaggcaaaagtattgttttggttttagaaatcaggatagttgttacccttatggagtaggagagctactgcctagaagagggcacataggggacttctgggtgctgataatatgctgctttttgatcagggtgctgcttatgtggtgtactctttataaaaatgtattgatgtttacacttacgtgcaatttttgtatacatattattcttcaataagaagttaatagggccgggtgcagtggcttatgcctgtaatcccagcactttggggggctgaggcggatggatcataaggtcaggagttccagaccagcctggccaagatggtgcaaccccgtctctactaaaaatacaaaattagccaggtgtggtggcagacacctgtaatcccagctactcaggaggctgaggcaggagaattgcttgaacctgggagacagagttctcagtgagccaagatggtgccactgcactccagcctgggcaagagactgagactctgtctcaaaaaaaaaaagaagttaatagaattttttcattcttttcaattaacttaccaaatcctggtattgagcttaccatgtgatacatataaatgcaaccccagaatatctcctgatatgatctcatgatgccatgggaagcagtaagtctttttgaaaaaaagcactgtttcacttattaaaatgccaaatacattttaccagaatttattattgaaacaaatcttagtgttatttttgacctgctgtaatgcttttgcttgtttttttattatggtaagaacatttaaattgagatctacaatcttaaaataatttaagtagacaatacagtattgtaaagtacaggcacaatattgtattgacaatctctaggacttattcgtcttacataactgaaacttcatacttatctaacagcaatccctcatttccccctcctcagaccctggcaaccactgttttactctgtttctctgagtttaactattttaatttcttatcaagtggaatcatgccatgtttttttccctgtaactagcttatttcacttagcataatgtcctctaggttcaaacgtgttgttgcatatggcaggattaacttctttttaaaggctgaatagtatacacacaaccactacattttctttatccattcacctatcaatgaacatgtagtttgatactatatcttggctattgcgaataatgcttcaaagaacatggaatgcaaatatctcttcaacatacagattttatttcctttggatatatgccccgaagtagaaattccagatcatatggtagttctatttttaattttttgaggaagcttcatacagttttccataatgactgtcctaatttacatttccaccaacagtgtacaagtgttctctttcctttacatccttactaacacttcttttcttttgtctttttgataacagctattctaatagatgtgaggtgatattgtggttttgatttgcatttccctgatgattagtgatgttgaacattttttatctacatgttagccatttgcatgtcttcttttgagaaatgtctattcaaatcctttgtcaatattttaatagggttatgtgttttcttgatactgagttgtttgggttccaaatatattttggataccaaactcttatcagatgtatggtttgcaaatactttctcctattccatgggttgccttttcactgtgttgtttccttcgcttcctggttgcattttagtttgatgtagtcccacttgtctagtttcacttttgttgtttgtgcttttgatgtcatatccaagaaattattgtcaagactaagaaaaaagagagaaaactcaaataaataaaatcacaaatgaaagagatggtacaattgatgctacagaaatcaaatggatcataagggactactataaataattatacaccaacaaattggataacccagaagaaataaattcctagaaacacacaacctccaaagattgaatcaggaagaaatagaaaaccttaatagaccaataacaaatgagattgaaatcagtaataaaaaacctcccaacaaagaaaacccagaatcaggtggcctcattggtaaaaattttttctttttttttttttttttgagacagagtcttgctctgtcacccaggctggagtgcagtggtgcaatctcggctcactgcaagctctgcctcctgggttcacactattctcctgcctcagtctccagagtagctgggactacaggcgcctgccaccacgccaggctaattttttgtatttttagtagagatggggtttcaccatgttaggcaggatggtctcgatctcctgacctcgtgatctgcccgcttcagcctcccaaagtactgggattacaggcatgagccaccacacctggccccctcattggtaaattctaccaaacatttaaagaagaattaacaccaatccttcttaaactcttcccaaaaaatgaagaagagggaacacttccaaattcattttaaggccaatgttaccttgattctaaagccagaaaaagacactcaaagaaagaaaattactgataaatatttctgataaatatagatgcaaaactcctcaacaaaacactagaaaactgaattcaacagcgtactaaaaatactaaaaggatgatatactatgatcaagtgagatttatccctggaatgcaaagatggttcagcatgctcaaatcaattaatgtactacatcacattaatggtaggattaaaaataacatgatcatcttaatagatgcatcttaataaaagtttttgaaaaaattcaacaccttttcatgacaaaaactctaaaatacattaggtatagaaagaatttacctacatataatagaggccatatttttgacaagtctacagctaactgaatactcagtgatgaaaagctgaaagctttttctataaggtcttaatcaaggcaaggacatccatttttgccatttttgttcaacacagtaatggaagtcctaatcaaaggaattaggcaagaaaaagaagcaaaggcatccaaatcagaaagaaagaagtaaaactatttctcttggcagattacatgatcttatatgtagaaaaccctctttctacaaaaatctgttgaaacaagcaaattcagtaaacttgcagaatatgaaatcaacatgttaaactcacttttgtatctgtacactaacaatgaactatctgaaaaggaaattaagaaaaaaatttatctacaataacatcaaaaaatataatatttaggaataaacataaccaagaaggtgaaagactgaaaactatacaacgttaatgaaagaaattaaagaagatgcaaataaattgaaagacgttttgtgtttatggatgggaagacttaatactgttaaaatgtccatactacccaaagattcaatacaatccttatgaaaattcaaatggtagccaagtgtggtggctcacacctgtaatcccagcactttggaagactgaggcaggcagatcattttgggaacaaaatgtaaagttgcttctaaaagagatttatgaagttttttgtttactctatgtttaattatttgctgagtacacttatcacattgagatgggaatttgaacaagatctttgtacttgattagagggaataaaaacagcacacttatcaaataatcagtgtgttatcccataattcagcttgtggcttgctgaaagttgactcttgtgtaaaagattagttactttttattgttttaaggctagaaacataggttctatttttgtcaatgctactacatcccacaaagtgtctatatgagccatttccaaatttccatttatgataaggggctgtgatgcatgagtatacccacgtttttactgacatgtgtagagacaaactcatgagtttgcctagttaccttttattctgtattcacagatttccaaaccttcggggttaggccatactttcagggaagtgggtgagctttattattgaggccaagtcttctatctctgtttagatgcaaacctagtacttagggaccttgtcatatctattttctgcaaagtactttctgtacttgtcaagatcaataactggttttataatgacagaggacacagaatttagccttcagaacagaaatggctatttaccatgcgaaagtattttttttttctgacaccatcagaccagtgagcatagatttctctctgagagacactttttaaacacaaaaattacctatttatcttgttgcatagcagctctgtcaactaaacagtgcatttaataataatgataatacataaaaagtctagtatttcatggtttacaagatattttccacattaattgtcccattggaccccccaaaattctataaagtggtcatataatgtattatgccattttgtatggggtaactgatgaggtaacagaccagagactgagcctagtttgcccagctaagaactatcaaagccagtcttcccaactcagtccatgatctcttactattttacttcagccctgtaagattcatggttgtatttccttccatatagaactatggaataataattactaatttagaatattatatagtccattttgtacaaattgtctaatttgtatagtactatcctagtactagtatatataattctatatactagtcatatatactagtatatagaattatatatactatatgtatgtatatatacactaatatatataattatatacacatatgtattacatatatgtatatattatatatactagtatatatactatatataacatatgtatatataggattatatataaattatatactagtatatataatatgtacttgttatataattatatctacatatatacacatatatgtagtactatatctacatatactatatatctgtatatatatagtactagtatatataattatatatacatatatgtacacacatataggatgctatgagaatgcataggaagggaacatagtcctagagtatcataaactttcactctgtgtccaaagtctttcattaaatgataccagaacataggatctactgaaattctaaatggccagttggaagaggaaggtcatgtttggggaacttggttaaaaattacctttagtggaaaagaaagataataactcagtaaaagtagctagtaggctggagcagagtgtctatgtttgctatggtttgagtgtatctcccaaaattcctgtattagaaacttaatccccaatgtagcagtgctgatagagtggaacttttaagaggtaattaggtcataagagttcttccatcatgaatagattaatgctgttatcatgagagtgggttagctattgcaagagtggctttggcataaaagcaagctctctctatttcatgtgctctcaccgtatgatgctttctgccgtgcctttgtcaggtgctgataccatgctcttggccttcacagcctccagaaccataagctaaataaacttcttttctttgtaagttactcaacctatagtattctgttatagcaacagaaagtggactaagacagtggtttaacgtctggatttcaaaatgaaaacctgaaaaagaaagaatgggaagaggtcttacaaaaatatcaaattaggctcaattttattgaccacagtttcttaaacatagatatctctcatatattatcaaacacttatggtgaaacactacatttttgttcataggagttctccatagcagaattcctccatctccctttactttgccctgaaaaaatcagcaccccaggaattctttatctttcaaagacggcaacatataaataagcatttgagtttcccatacaggaattttttgcaagtctggcttagaaaatggccatgttctattcaaaactctttgaatttctggttaaataaaaatgccaactatgcctttttcattaaataagtctatctttcattatctaaatgtatgtcctactataagttcccaatggcagctatgtccttgtgcttagggattgcaagatgaaggttaactattaacgacagtgtttctgaacctgaagttattagaaaatctttagggactccttggactcttggaaattatgtacaaaattataatgactcatttgtacagtcatcccttggaatctgtaggggattgattccagagccaaataccaagactgcagatacaaaacccagtggatgcttaagttccttacataaaatggtatagtgttaatatttaacctatattcttccatacactttatctctagaatactgctaataactaataatatgtaaattctatgtaaatagttgttataaacaatgatttttattattatttttgtggttgtattgttacttttgtggaatatttttaatccccagttggttaaattgtggatgaagaacctactaatatagagggtcaactgtacattctcttgggaagtatattcagagctttcattagagacttaaaaggaacctatgttactcccctgccccacccccaaaaaagttaggaactactgcttggtgggggtaataaactatccttggaacatcagattctttagatacatcatagagaattggcatctaaagaaatattctgtggtaaccagcttccaagatggcctccagtgatctgcactttctggtattcagatttttgggtcatctcctttcaaattgtatcagggttgatctctgtggccaagaaaattcaggaggagttatgatgtgccactttggaggttaggttataaaaactgtggcttctgtcttggttacagtttctctttctccaatcactcactctggaggcagctagctgtcaactcacaaagacactcaagcagcctatggaagaaggccacatggtaaaatatggaggcctccagccaacagtcagcaaggaactgagacaagtcaacaaccatgtgagtgactcgagaagtgcttctctagctccagttgagacttgcagtagcagcagcctcagctggcggcttgactgcaatctcttgagagaccctaagctctcctgaattcttgatccttagaaactgtgtgaggtaagagatatttgttgctttaagatgctacatttggggataattcattacacagaaatagatatctcattcacattatcttgactggtcatgattaaaagaaaagtgaatgtaagaaaataaagtgtttttaatgctgaccttccctgttaatcctagaaaattagagtttgaaataataatgtcatagtcactattcctttaatcttgttggtaaataatgaatgcagcgtggcccattcaccgccagcacttggtcaccattgtgatctacacagcaagaagcagcctaacgacctgtctgttgaaacaaacaagttttcttttaagtgatttctttgtttccatttataaggcaccaactttcaaaggtgttctgggaaacctttcttgtatttcttctaagcaaaatcaattcaacagagagttcacgctttgcctgtgatcaatggggaagtaccagtgtagctttcttttttttcctatagggctgctcatagtcctccgatagactttacagctgttagttttgctgcagtagtgacttgctaaaatggtggctcatttgaatggtgcttgtattaatttacactcccaccaacagggtacaagggttccctcttctccatatcctccccaatatttattatctttttttcttcttcataatagccattcaacaggtatgaggtgatattgtggttttgatttgcattttcctatgattagtgatgttgaccactttttcatatatctgttggccatttgtatgtcttttaagaaatgtctattccgatcctttacctttttaaaaaatgagttatttattttcttgctattgagttctgtattttgaatattaacttcatatcaggtgcgaatattcatatcggatgcaaatattttttgttattgtataggctgtttcttcatactgttggttattttcttgtggtgcagatgtaagcttttagttcgatgcattcccatttatgtacatttgcttttgtttcttaatacacctttgtattgagtagatcagatcctttatgaaagcaagaagggatcaatgattacctgatggagaagaagaaaattgtgaggaaaagggtcaatgaggacattctttgctgttttgcaattttccaatgagctggtcttgatattatgtttgcgtaaatagcttggtctgatcttggacactaaattccaatccagcaggttctatctggaaggagactatatgatggtggagacacaagtctgaaggtgaaatattgcacgatgtagaaatagatcaaccatgcacatttatagaacatctactaccaggtgctaggttctgtgctgagcaataaacataattcctctgtaatttttgtttgtttgttttgtttttgagatggagtctcactttgttgcccaggctggagtgcagtggcgcgagcttggctcactgcaacctccgcctctcaggctcaagcgattctcatgtctcagcctcctgagcagctgggactataggcgcacgccaccacacctggctaattttttgtattttagtggagacggggtttcaccgtgttgcacagggtgggcttgaactactgagctcaggtgacccgcctgcctcagcttcccaaagtgctgagattacaggcgtgcgccaccacacccagactcctcagtaatttataacctagttgaaagatttggacatatgtatcacaagatacctatgaacaaaggcaagggcatatcttatttataagatgtttagatagatttcaaaggaagtttttcagccaaaaattccatcatgtttccatttttgaaactaaataccaacatatctcaaattcagatctcaattacttctactggcaaaatgtaaagaccattccctcattcatttgttatttctccaagtatcctgagtactggatatctgaaaggctctctgctaggtactttgtagggtaggaaaacctcaaaggatgtgtggaaatgaaaaaagtttccaaatacttcttcaaattttgtgaaacttatcaactgaaacaaggttgatttgggtcaaacaaggtttgtgaagtaaaagcaaagcaattttaaataggctaaaaccccatgggttgcaatgaaagcaatgttaagatgactcttaagtaacttagaactgttgaggactttggtaattaaaatctcttcctcatagctcccccagcaatcaggaaacaaggatagtttggattaaggtctcataaataaacatacagcttgtcagtccttggagatggagaagtcattcttgagtgtgccacatggagggctcagagataagtgatgaccctcttgtcactctggcagaaaatatattaacttctttaaaccaagaattatagtgatttcagtggtacaattacaaggagtgacttctgggacttgcataaatcaagcttatttaaatagtgtttcagaaaagaacatatgctactattaaagagttggaaaaaaacaactgcaatcccataagataaagttaggtgagaatattcatatttgtttcagatacaagtccattatttatgtcaaataattaaatacctctttagatatccattccaggggaggctcttgagcctttcacctctctcatgtccaaacttactagttatttcaatactgaaataattccagttgttcatgaattatttgatgagatttagagtgatctatattagttaattcatttatcagatttgttgaatacctgttatgtgcactggatggcaattggtgccatgttgtatatacattggacaaaggcaaaattctgtcttgggatgcttaagtatagtgaagaagaatgacaagtgcaaaaatatctaattccaaagctgagagaggagagaaagattatttaagttggtatggtcagataagtaaaacagtattttaactaagctttgagaaatagatagaattctacttggaacattgaggaggactccatggaaaagtaataaaatgaatgaagaccagagccaggctggaaaaaaatctttttaatggaatagcagtgagcaatgcagaaaagctagagatcatcttactgctgtgcactctaaatattccccatggctgctaccttgtccaattccctcacagtcctgcctgctacagaaagcgtagcagttttctctttatcgatgatgagcaatagaaagaaatgcttcactctgcctaggcaacaggcacatttaatatgggatttctgttgacagtgccttaagccatggagctagctaatcagcaccttactcattgtatgacaggaaagagaagagatctgggaatgagcagatcattcagcattcctgcaaacatggagaaacagagccagacagctagctctcccctcccagtttctatgagttccaatgtgaccaaaagccttatcttggcctttgcacctggaggtcaccgctgccgctgggaggatgagtggaggaacttgggatgtacatgatagggtcagccagccagcaaatgagtgtttgcagagtgactagggaggagcaaaggagagctttcactgctgtaatagtccagaagttgctgctgaatcaagcgaaaagaataagcaaagtgtttcagaagtcagcctgcttcacatcttgttgttcatttattccctctattctgaccactgagcccaccaagctctccttcttgatataacttttatcatatttaatattagggcaagactagtttgggatcttatgtgtctaatttatataaatgtagcaaatagtctttttgatggtaagataaactagtgaattatctctaacataatcaataaattttcttattgctgggtgtttctcaaccatggtttcgcattaaaatcatctagcgagcttaaccgccccctccccaaaacacacacacatacacacacacacacacacacacacacacacacacacacacacacacaattcccaagctgctcctaggtcatttataccagaactcaggttaggactcaggcaatggcgttctttaaagctctgcaggtgattctaatgtgccgctggagttgacagccactgttccaaatgtcttgaagatgaataataaaatccagattggtagtgagtaaaaatatatgtgtgtctaatgtgtaagtctcaaattattaacatttctcaacaatgtatttccattttaaaaatcatattttaaggaatgaccttcaaaattttgttatagaatattattttagtgatgtttctctgttagtaatgtgaagcatgttgcacataaactgtctggagaatgtggcattatttgcaaacatgtcagagaatgcagcagattttacaaaggtttatgaaaacaatatgcttcattatttgttcacataaaaagtaacaaaattagcttcctgttaaacagaaagcccatagagtagaagagaaaagggtctggttccttattcactcccagctaccgtgagggtgtcttattgcccaaatccaggacatctttgactttttcttctcttgactgtctaatctaatgtcatgtaactataataattcaaaataaaagtagttaaaatttaaaaatatatttaaagactatcaagatctgttgattctacctctgcaaattttctttcacaccttcatcatttgtccatttttgtggccacaatcctaaatcaaactccctgttacctcctgccttggtaattgtcatatgctccccatgcaaattttttctcagacattgcctctggccaaagatctgatggcatcatgtttttcactcatcttcagtggttctctgctacccacagtaattttacaaaacattagctgggcattcaggttctccgtcatctggccccaaccttattcccaagacttctcccctttgtgtataatactatgaaatgatctaactgtttggtagtcctggacatggctatgttctttctgctgtcagaaccctggctcatgctggtgtttctgccaatgcctaaatcccacccagtatagagggctcagatttcatctgcttcacaaagccctgaactacagagttaaaagtaatgttttttctactgtaatcacatcgcagcacattatctgaaccattttaaaaatatttccccagagtcacttaatctttctgagcctctgttcttttattcataaaatgagaacaataatacctacctaaaagactgcttgtgaagagtatgattatgtgtgtacaaagcatagtgcgcagtagacaattttcaaatctttctttcttctctctcctttccttccttctttccttccttcttccctccctccctccctctctccctcccatccgtccttccttccatccttccttctatgtattgtccattataactttgtaatttccttttgggcaggatcctgtgattggtaaatttttgttttccatgcagtttctaggctaatgctttgcatgtgtaggtactcaatgtaaaggtacatgttttaagtgaaaggacccaaaattcatgacttgctgtacaaatgatgatcagggtttaggagaggagatatagaccagaaatctagttgttgttttgagttattattattacttaaattatcctatatttttaggttaaaaactcattgagcaaatcattatcttgatgagaaatcaagagtcaggttaagtaaatttattttggttagatgtcttctaagcatcagttaaggattcaaaccaaggcctctcccatgtgaaaacatatattgtttcagcttatcaggattggttagattatctccaagattatgtctatttaaatggcagttattgcagataatatcaatgtcctaggtccacaggaaggcaagaagtagacttagcagtaagttgctgagcaggaattctgaaaagggtgaccaggatcaggtgaagcacgtccagagagtaaagggggtaagcaagctcttgttattagcccatatgtacttaccctgggctcaccgaagagtcctaaagcaaagcttgctgtggctgcaacctaaggattggaacaagtctataatccttcaagagccaagtgtggatttctcccttctactctctgcctcagtatattttccatgttttcttacttgttctgttgctggaagtttccttctttccaagagatactcagttttaaagaagccacaggtgtctttgccaaagcttgctctctgcatcctgttacactcttagagaatcccctgatgacgtcattcaagacagcctactttcgtaattgctgtggaaggggcagaaggtcctgccactacattgctttctgtcacccacccccaagatggaagaacaggttgtctctgaggaattttgatttggggcacattgattccagtctctctttactggagcttgaaataggggggccaattttcctataaaaaagagtatgaaactgatatccaaagagacacacgatgagaatctatgaactccacgaaaaaagagctgataattataattgtcttcattcttggtagctttctagatgggttctaatcccgcaaggggcttagttgccttcctagctttggcgtctataaaatagtcctataaccttttaataaaggtttaataaaggcctaagcccacatgagtgagttttatacattcaaacaatctcctaagtgtgagagttaattaatttttaaactattctcgaaattcagccttaatttgcttttgcttaagctgggtcactaatctgtgctgaggacccattatccattctttgttaggttctacagtttacctctagggtacatttcatagtccttaatgtctcttctgtataactgattatttatggaatttcatgatgcgttaaatactttggctgagtagcaaacacatttcatctaatctttcaattccacaacagtactactgggcaacatttttattcttggtggatacaatttctttctttttttttttttctccttttattccttcctccttttctctctctttctttcttttaaatgtttgtgatatcaggatataaagagccaggtagaagagcacagaattagaaaccagaaaactgagtcctagtcatctcatttctcctggcttcacttttacccttaagtgaggagactatacccgagttccacctagcttgcaaattctataattcaattattccatcaccattctgaaatataccatgtaattatagaaattactagaaaattttttgaaatacacatttcccaaatttatttgaccatggaatactttttaaataattatatattggtagaacatatacgatagttcatggatataatatgcactttgattaaagaatacaaaaaaatggtctgcaacaattaattgcttcaagaaatgattaaaaaattcattcatattctaacttaattacaggaccaaaacaataatacaaattaaatagattaagtcattttatttttattaagtacataaaaaagacaaaaatggatgaaatgatgacaagttgcataacatggagcagtgatgattaagaggcagtgtataccagtaaaattagttggtaaatactactaatagatacttagcattgacattaaaattaatatttatatgaagctttgacatttaattctacttcatgcattcatgatacacccaatcacttgttttgcaattatttcaatgtggattcttgcataataacaattatagatgtgtgtttaaatatattaaatatattttataagaaacaatgttgttggtaatttttcttcttagactactcagtatcttatagtttgagaaaaacagacctatctgaacctagatactatatatgtttccaacgagtagcctatttttcccttccttttcctctattgctcacgtgcttacatgcattattattgggttatatattgagttattctctcgttggcttttgtattctgtggcattacatatctttgatagcagtaagtttgacactcaaattttgtagaagtcaatggcagtggtccttttataggtttaaacttacctgactgcattatatcccttgagaatagttttaagggattttcattgaaactactgtatatgattaacatataatgcctcctattatgaacttggaatatgcacattaaaagagttataagttacagttaatcatttgttcattgctttctttatagatcttgagaaaaacctgatgagtgtagcattgccattttgtaactaatccttcatgtaatgaacctaagcttccattattgtgaatgaattagtctatttaggaaccgctttggcttagcggtgaactgtatttcctacttaaggagccaaacattaggaagcaactgtagcagtgtacagcagcaacttcatcattttggaattttaaaattctaccttcagggatcttagaaccatcctagcttccgagatctcactgtgagtactggagtgagcagagttgtaccaggatggagagattgctaatttccaaaaatgggattactgagttaaaatataatcctgctttcagctaaaaacaaaaaaaccccaaaaaaccaaacagccctttatgacacaatttcactatcctgaacgcaattttatttcattgattataaacaatgtgaatgtagataccaatattgcaattatgactaataattggaggcaattatttatagtagttatatatcagtatatatatttaccatttatactgatattaatgactgtggctttttaatagtggccacagaagtcacatagcatggtttagtgaagtttggttcacatttgtaggcacttcagaaatatcatctttgagaacacacacacacttaagttcagtgagaacgtatataattcaaagaataacataagcaatgatttaaacttctatgtatgtttcagtctgcctcagtgttagcagcaggaaaattattctttacaataatgaaagacatttccagattcaaaaaaaagggaaaaataaaaaccatggaaataatatatttggaattacagggctactagcaatctaagtgttgtggaaaatcttggtaaatagttcagtgaaattatatagatagaagattgattgaataaacctactccaaagcattgatatgccacagcattcttcctttggctgtgttctgcccaatattttaacaaggggttgcatcaaaacagagtgatgctgatcaactcctgaaaaatatttaaagttaaaagaaatgctaagcaaaaagaacaaagctagaggcatcatgctacccaacttcaaactacatgctacaggaatacagtaaccaaaacagcatgttactggtacaagaacaaacacatagaccagagaaaaagaatagagaacccagaaacaagactgcatacccacaaccatctgttctttgacaaacctgataaaaacaagcaatggggaaatcattccctattcaataaatggtgctgggacaacgggctagccatatgcagaaaactgaaactggaccccttccttacaccatatacaaaaataaactcaaggtagattaaagaattcaatataaaaaccaaaactctaaaaatcctggaagaaaatctgggcaataccattcaggacataggcacaggcaaagatttcatgacaaaaatgacaaaagcaattgcaaaaaaaagcaaaaattgacaaatgggatctaattaaactaaagagcttctgcacaggaaaagaaaatattaacagagtaaacagcctacagaatggcagaaaattgttgcaatctatccagctgacaaaggtctaatatacagcatttataaggaacttaaataaatttacaagaaaaatacaaccccattaaaaagtgggcaaaatacatgaacagacacttctcaaaagaagacattcatgtggccaacaaacatatgaaaaaaaaaatcactgatctttagagaaacccaaatcaaaaccacaatgagataccatctcacaccagtcagaatggctgtgattaagaagtcaaaaaacaacagatgctgcttatggagaaaaacgaatgcttttactctgttggtgaaagtgtaaattagttcaactattgtggaagacagtgtggcaattccttaaagacctagaggcagaaatatcatttaacccagaagtcccattactgggtatatacccaaaggaatataaatcattctgtcataaagacacatgcacgtgtatgttcattgcagcactgttcacaatagcaaagacatctaaatgcctatcaatgacagatttggtaaagaaaatgtggtacatatacaccatggaattatgcagccataaataaagaatgagatcctgtcttttgtgggaacatagatagggctggaggccactatccttagcaaattaatgtaggaacagaaaaccaaataccacatgttctcacttataagtgatgatcagaacgcatggacacattgggagtggggaaacaatacacactggggcctttcagagggtaggagggtgagaggagggagaggatcaagagaatagccaatggatgctgggcttaatacctgggtaatgggatgatctatgcagcaaaccaccatggcacaatttacctatgtaacaaacctgcacatcccgcacatgtacccatgaacttaaagttgtaaagtaagaagaaaagaacttgtctagatgcaagttaatctgaaaaaaatttatattaactgagcacactcccagccccaataacataggtgtttttgtttagcaaggaataagaaaagaatggatattgggtggatacctaatagtagtctttgtcagactgaatcgagcagatataataaaaaaggaatgtgtgacaatgctatggtttaaaaataacatgatacccagcactttggtaggccaaggagggtggatcacttgaggtcaggagttcgagactagcctggccaatatagtggaaccttgactccactaaaaatacaaaaattagctgggcatggtggcagacacctgtaatcccagctacttgggaggctgaggcagaaattacttgtacctggaaggaagaggttgcagtgagctgagatcatgccagtgcactccagcctggacaacagagcaagacttcatctcaaaaattaaaaaaaaaaaagatagtccagaaataacaagacacaatctaacaggaaagaaaggttaatttcttatttaggctttaagaaaaaaattttaaaaagcagtagcgcaagtacagaaagacctcattctcataaaaatggtagttaattgcaagtactgtatcaaatatgtgataagtctatctaaaaatcttctaaattgaatctttcttgagggaaagaaaatcaacattaattgaaatattattgctcagacaagaaaggtagcagtagttcattgtgctcaaacaattgtcagaccacctatggaatatcctgtacaatgaaaaattacaagtttcccagagtgtgttcttcagagcagtagctcttagaacattaatgattattatgagaagggaaggtctattgtcaaagaagcttggaaaggatgagttgttaagcaaaaggtgtcttttgagcagtacttttcatggtctttaatataccaatatgcattgcagctgtccaagacaggaggccattaaggaagcctgaagagaaatgtcccaccttagtgtcctgaaaggatatgcactcctctatagctatttactttttactttcatcccctgacctttcttccagcactatggtcctctcttcatcacttctctctattttgattattttcttctccagtggctcctaacttctttctacaaatgcatttgctctgtctgataaaaatcattttaactttgcttctccatccagctaccttctttttttacccttcctgttactgcttctggtattcgatggtttttccttttcccttcccccatttttgaacgatagactactttttttcatagctcatcttgcacgttagtcttccatgagatatgcctgtaggcatgcacaactagagatgttaagtagaggcagaaagaaaagaaagacatctggcaattagatctgactttatccattctggctgttataacaaaatagcatacactcagtagcttacgaacaatagaaatttatctcccaaagttatggaggctgggaagtccaagatcaaggtgccagaagatttgatgtctggtgagggtgtgctttctggttcatagttggcaccttatagttgtgtctacatggttaaaggggcgaagggtctctcttggacctcttttatagggccactaatgacatctcaagtgccccatctcaaaatattatcacattagtgattaggtcttagaatatacattttgaagggacacaaacatttagagcattccaaggtcttatttgtttttcagtggttaagagtttcgtcagggaggaggagtagaattatgtgagcttacttcagagcagagtttactaatcttctatgtgtgtgtatggagtgggtgtaaatcctgaatcctttcagtaagaagggtacacctatgaatgccttctcagtacacttggccctctgtacccatgggttctgcatcctgggatttaactaaccatggatcaaaaacttaagagaaaagtttgcactggacatttacggatgtttttttcttgtcattatttcctaagcaatacattataacaattacttacataacatttacgttatactaggcattacaacaaatctagagatgatttaaaatatatgagaggatgtgaatgggttataggcaaacactatgccatttcctatcaggggcttgagcatccatggattttggcgtctgccagaggtcctggaagtaatctcccacgaatactgtgggacaactgtataatagttttttgttgtttttagtttgtttttggagacagggtctgctatatcacccaggctggactgtagtggtgtgattgtagctcagtgcagccttaaactcgcagtctcaagcgatcctcctgtctcagcctccctagtagttaggaccacatgtgtgggccaccacctggatcatttaaaattttgtttttgtggagatggggtctctacaaaagagatgtcacttaggtaggtctcaaactcctggcctcaagtgatcctcctgccttggcctcctaaagtgctgggattacaggcaggaggtaccacactcagcctgtataatgtttataagcacaaaataaaattgtagaattaaaaatgaaaccagttgtattaaaacaaattatacaaatattaaaataaaaatttggtatagttatatatgtgcatctttattaatgtattaaatcataagatccagcagatcacatatctaacatacttaattttgaagtgcttgcaagaagtctaatgagataagaaggtatctatgatttttactggcaacaaagtcacaaactacagtggtttggtaactatattcataattgaagaaaatggtatttttcagttacaagttagtaaaaatacagatgtaaacttgtcatacaagtttaccaatctcctgaattctttgtggactccaggttaaaaactactaaatggtagagtatatagttacaaggagtcagatttaagctcattttaagtatatgtattatgtgtatgtaaagccttaataattaagatgtcctagaatgaaaggattttctcacaaagtagtgatctacctgttaatggaaacgtccagttagcatctagaaaaatattgaggatgttgtagtataacactaattaatattagctagcatctactgagtgcttgctgtgttttatgcactgggttaggagcaatttttgcattgtgtcttttttttcatgatagttacgtcaggttatctctgtgtcatagataatacaatttaggttttgatatttgttagaagttgactatagcctgcaatcccagctactcaggaggctgaggcaggagaatcacttgaacccaggaggcagagtttggaatgagccaagatcacaccactgcactccagtctggacaacagaacgagaccccgtctaaaaaaaattaataataaataaataaataagttgacggcaataagtggcagagtatgaactctaacccatatctaggtgtctccaaagcctataattggagaatattttgataataatgtaggagagagattggtgagagaattagagatcaccttgttcatcctctttatttgatagatatgaggacactgagaactcaaagaagttaggtgacttactccaggttacacagtttatagcagagccagaaattggactttgatgcctttttatgtggaaacatgagcttttattatttagctcttcatctggtggaagtggaacacaacctgaagagagaggcaatggactacactatggtttggaacagagtgtatagtaatttcctatttcatttagacaacagggatatgcctgaaagtgcctttacccatgtcatgcatttattcacaatgaacacaaaatttacttgagtaattttttttttctcgaggtatagtctcgctctattgcccaggctggagtgcagtggtgcgatctcggctcactgcaacctccgcctcctgggttcaagcgattctcctgcctcagcctccctacttgagtaatattttaaatgtaaccatagtgaactgtccaatactaaaatttgtgcctttgataatatttatattatgaataaaaatatgctcttttaaccatgtcctcatctattttaccagaaagtatcttgtgtattgtcaatacaaagtatctaatgcatgaatgactgagtatgattgtctggttttctttaatcactacttacaccaaataattgggtatttacaatatactgattctattattttttactgaaatataattatagttaaatttaccattcgttaacaatgagggaagaagttgtctagattagttcaaaaaccaacatgtaaattctttctggaatacggtaatacataaatgaatatgcaataaaagtgtgaaaacaatttttaaataaaaacagttaaattaatttctaaaatatacagggattacactaacaaattttcctgagtatgaaatttaggaagcatgcttttctaaaatgaatgctttttaacattatttataaacaaatgttgtttctaatattttatatagcctacatgcaataggtgctcaataaatactcattaacttagttcaagatgttgacagaacacatggtttttgttttcctttacttttcctaatacccattaaaatagtagaaaaactaaatctgtataatgcacaacaataaagagaatggggaaaaggccatcagtggtaagagattttatcgaatttctggaagatgaaatatgagtgagtggtgttgattactgaagcaaaacaaagtcaattattgcagagaatatttgtagagggagctacacccaagaagaagccctaataacatggcagaagctaacaaggctccagtttcagataagccaatgctgatggacattgaaatgagaaacatagatgtaatcagcattttgatcaagagcatgtgcactagtttttgctgcccaatgagccactttaaatcataatggcttaaaacaaccatttatttagtttactattctgcctagtcagccattttggctgggcttatatgggcatattcctgtgtctttgctcaaccaatcagttgatcagctctgcttctgcaggttggttgggtgtcagttagcaagataggggccactaggccttgcaaatctcatcagactagtttgggattgtcacttagtagaggagcaggattataagagaaataatataaacgcaagatctcttaaagtctaggtttagaattggcacacattaacttcattcttgcattgcttgactaggttataagaccagtccagattcaaaggatatcgcaacagactgttatttgttgatgagaagaactacaaagtcacattgcaaaagggtggatacagggaaggtataaatcttgagcatttgtgggtctaacacaatgtagagggcccagctttatccttctctacttaccacatctgttctcagccccatactagaatacgtggcatgaagccaggtatttaccatcacttcaacagaagcgaaaacaaagcaaaacaaagtttatttaatgaaaacattaaatgaaagaaaatagataaaatatatttaggaaaatctcttggaaagagtatattaatagattagagagtgtgaatgaggttttggaaaaccttgagggtgtaaattgatgctagaaacatccttctctgagtggcctactaattctgacataggaatcagagaaaaggaaatgtaatcttaactatttcactttgcagaaaataatctttacatagtcataaaaatgaaaaccctgtttatagttttcaactttagaattgctccatagacaagtcatataagtcttaactgtgtatcagtgtaaatgttttcaaacttaacaatattaaaacaccaacctgggacccataggcacagacatatcttttacatctttgaaatttaaagctcaatgtgatggtctgtgtcttgactctatttagccaaaccactgtgtcatcttttactaatactctttccccatgatagtagccccaagacaagtaagctggtctagaggctcagtggatgttcagtgacagtgcaagtcatcaccctttactttttgcagataccacaaagctgtttttaagagtctcttgccatcctgcctatgactttgtgcagtggaatcagttgagttcatgggaaagcaaataaaaggatggtctctgtttatagacatagccctgtcttagaaatctaatctctcttatcactctcatctacaaagactgtcaaggaaatgtgtcctctcctgcccatggagacagattgggcatctcacatgaaaaaatatgtcctttgaacttgcctgagaaattccagtaacttttttctcaccaggatacttttctactgtaagcttgccaatatttggtaatctctagaataggaacccatctcaatcagcagtgcacaccatcctgttttgtgcagtctaagtttagagctgtctaagtccatttgagctgctacaacaaaatgccatagactaggtagttataagtatcagaaatttatttctcacagttctggaagctgggaaggccaaggtcaaagcaccagcaaatttggtgtctgatgagggcccactttctggcttatagatggtgcattctacctgtgtcctcacatggtggaaggagacaagtcaggtctctggggcctcttttataagggcactaatttcattcatgaaggttcctccttcatgatataatcaccccccaggccctaccttctaatatcatcacattggtgattaggtttcagcagatgagttttgggggaatacattcaggctgcagcaaggtcaaaaagaatattgcatcattttgctttagagacctttctgttctagctacattttgattatctatatgacacaataaaaaagaaagtcaggaaacctaagatcttatacttcaatagagtttttataggacaacattgattaatggctacagttaatacaaaaactctaacagcagcaatcaaatatttccattcatcacacttgaaacttggcctcaggtctatggtattttgaaattttttgttgttgttttgagagtgacatgagtgcaggcccagcttcatggatatacaaactatacattcacatgggttccacacctagatgggctcttacatcatgtagctggtcctacctgggagagagctaaaaattaagttgcagtcatcaaattactgatcagatactgaaattaaacctgaaagatgttgagaacccagagaaattctcaatcatgttaataatactttcatgcatttgacatttcttttttcctgcctcttctctctacctgtagaacttttcaagttccattattataccattgttggccctttgtttcctcctccaaagacttaaagaagaagttatgattaagcatatgaaatatgcataccaggttttctataaagattcctcggcatctctgccaagctgtcatatgagcacttgcatgttgttatataaaaacacatattttaaataaattttagtgctgttctaagcaaaaagcacatattttaaaaatctggagttttctgtttcaatttgagagaactacattttgcttaattactatttaaatcactgtaacacaatattgatgacaaaatttgagtttgctttttaataaactgtcaatcaaagaaataacatagaactttgtttttctcctctgttaaggcatggcttaactgtaatttacttgaaaacattatactgtttgacaggaaaacagaaccaccttgaattattctaacccattcagatttaagaaaatgcatcgtagcaaattaactgctatttggttttgatcattctgtctgtatcatagaaatatggttcactagtgaatcaatgagagataaaaggtgatcatggtctgtgagataaatgctgcccctctgagttgcttccaacgtagccagcttcagtgtatcagttagagtagttaatactaactgttgtaacagataaatacccaaatcccagttgctcaaacaattgaagtttatctctcattcatgctaagtcagttgatgtttctggttcaccagctgccttccacctggtcacccagacacctgggtttcttcctatgcacctgtggcttcattttcctctcaaacttcagacttctctcccatcagtatgtgaatagggaacccagagatgtttcctatgagcaggcccagaagtggcttatgttgcttccatttaccttacatctacatgtctatacaaaagaaatgtggtctagctatgggcccagggaagaaggaatgaatttcattgactctctgccactcgctgcttaaggtcagatgatactgcactctatccaaatcaatttctttttgtaatccttaaaacaaatgtgttgcatccatattatatttataacatatgtctgtttcttttggacagtattattctgtagacttcttgactgatacatcccaagatcatctttactgacttagggttacagttttggataagttatcccaatctcaggagtttaatatgccttattgcagatcttttccaacttctaggtaagaagtaaactcattcctaatcttactacttggacatagtctctccctgctaccatgtcctcacaggacctcttccttggttcagtattgcaactatctcccagttttcctctttcatctctggcttctccttctttatctcccttttaacttctatttgaccattaagtgttggcaatgcctcaggcgtggtcctcctttttattgccttacactatacttcccatgcctctgatttcaatgatcacttatatactaaggactcgccaatttgtatattcagcccatatttgtcctctggaactcagacctgtatatcctaccgctttttcaatatcttccattgagtgtttcagaggcattttagatccaaaatatccaaaactgaaattctgttttcccctcacagcctgcttactgcgacctgatttttctcttgtggcccttaaaactatgaatatcaacagtcatccaattcttcaccttcatcttcctccctcagttgctgtaagtaccctatcactaaggcctgtcgatttcaccttccagttatgcgctgcatctatccctctctcttcatctttcccggggccggcctgtctgtgctggcattacctgtttcctgaaccacagtgatagctgccttgatccatttcctggcatctgctcttgcccctcatccaatctgttctccatattgcagtcagtcacctgtttgaaacagaagtccaaccttatcactcaccacacacccttgccttaaaaccagttagcggtttcccattgttcttaagactattaacgtcatttttgtgtgattgtccaggggctcaataatctgaatcacaccttgtctccagcctcctttctgccttatcctgaagtatcccctgcctgtttcactccctcagcttcttgtacaccgactttccacccagtgcctcagggcactttctcatgctgttctctctgccaggaacacatgcttctgcttttctctcccctttacctagtgaatccctcctcatccttcccatctttgtaaattcacttcagtttagaagacttctctggactgttatattgtcagaactatcttctatatatgctgcagaagtatacatacgctgcatacttctttcactgtacttatcagatatgagtaaatgtataatttaatgtaaatgtgattaaattgttagtctcttttattcactgaataatgtctatttgctcatcactgcatcagtagtacctagaacaatgtctcacacacaattgaatccaataagcatctttgttctcggcagctcctcgttttttaatcttaagccctaccctaccacctagcacagagagagtctaaataagtatttatttagttgaagtggctgttaatggctagtgtttaaatatattcatttgaaagacatatttcacaaaattgccttgttggccagcccagtttgactcccaataaaaaatacaagtgtgccattttgtttcagacagacacataaggttgctatttagaaggagggtttttattgatatattaagactgccttgaacatatcaagttaatttattcccatttcattttttagccatctgtttgtttctaaaggaacaaagatttggtagaagtggtaataaatactcagataaaaaatctatgtaataaaatttctatgtaatcttcagcacttactatgaaaaaaaataagtagattatggcagaataaaagtaaaatattttctgcttgatatttagagtgttgttttggcatctgtgacttgtgctaatgacctcgggtttaagtttggtttttattgtctgaagatagctggatttgggagagtaagtcaacaaccttttttttttttttagcaaaactctaaatgtctggatgatctgatagatgcaattcactattcgagtcaaatgttgaatatgtattacaatttaggctgttcttgaagctttattaaattgagcaccaaatcttctgaagctaatggaggtaaaatcatagtcaaacgcccttttaactcaaaagaaccatgcccccaactatttctctttctcaaactattgcttctttcaggctaggatatttgggatattaaagggctcttttaactcaaaatagcaaaaccatagccctcatcttcttatttaggaagacggtctttaacatttaattctgagcacttaccttttccgtaaatgaaattctgtttctcatttggatattggcagagagccaagataaggtgagcattgagcaggataaactagatgattccttaattcagcaaatatattttgattccaattgtgtaccagaaattcttctaggtactgggaatttatcagtgaacaaataacatttctatcctcacagagcttacattctgaaagataggtaataaataattatctatctatctaattgaatcactcttctctctctctctctctgtctttctctctttgtctccccgcttgggtctttcaaagacatttctgcaggagtacagctatgagctgtttagcagtcagtacaacctctggaagatgggtgtacctgcccaataaaggggatctgagaagaccgtcagtagcatctactatagaagataaatgcagtattccaggcaggagattatgatggcttggactagggtggtagctgtgtttacggtgagaaagataagatctggatatatttctaaggtagatttcacaagtttgctgcttgattgagatcagttgcaaggaaaaggaaagtcaaaaatgactatataaattctggtctgagaaactgtgcaaatagagatactgtttactgaaatggaaagggagagatcaagattttcatgttaaatttggtacattcattcagatatatcagtggaaagataggcagttggttatggtagtcttgagttcaggttggttttacaaatctaatttgggtattgatgattttaaaactgaggagttaccatagataaataggaaaagccactctaatgttttgaagttggaaattcaaaaggaaatggagcttttgagaaggagcagctggtgaggcagaaatacaacctagagtgaggaaaggcttggaagtcaatgaagatagtgttttacaaaggaatgcatgattaattgtgaatgctgctgattacttaagtgagaactgagaattgacaaatgaatttagcactgagaagaccttggatgatcttgagaagagctgtttcagtggagtactataaacaaaaacataggagtacattcaagaagaaatggtgggagggcaagaactgaatatcatgagtttggaaaactcttttgaggagttttactttaaagaatttaggcagagaaataagatatatagtagttaagacttaaattggacatattatggcaggttgctatgtaaatgggaagaatccagagaagaggaggaaattagtgatgcaacagagacagtaataactggagtgatatacttgaagaggagaaaagagatgatatcaggcacataaatggaggatttgataaatgtgatgggggctgcagagaaaaattgttttctgatttgctattatttttttcaaagaaataggctatcaactgagtgtgaggatagagcagaagctgttaaaaatttaaggagagttgtgaaataatcatctgtaagcaggagtgtgaatgaactaggaagatgtagtaatatttctggacagccctgagagctgaaatattgtaagaaataatctgaggaagttctgagtacttagacagttgaggttagggggagcattttattaaaacaatcacaaagaacatgggaaaaacagataccaacttggcaattgtcatagtattaaataaaactaattttggaaaattaaactaaaaagatgttatatgcattatgatgtttcaaaatagactagggccaatcagacccaatagtttctttatataagaccccatagtttaattatataattaagtgttacgttcaaattttgataaatgataaatatattgtaccaccatgggaatttgaaaatgcgaccatttgtactgggatattatcatgtaatattttaattttacctcttaattatcaaagtgaaagatttccatgcagtattatttggttgtggggtaattgtttaatttatttggaattttatagtgcttttgcttagccacattttattttgtggtcaaattcaaatgctgatctaatggcttcagagtaaaatgagaaaggtcaaatgggactggaaattagggttttcttcctgtcattaggtatatttatttataaaataactggaaaattcctcatgtatttaacatctgttccttctttccctggtcactgcatatcaagaagactttgacattgaggtttgatacggtttggctctgtgtccccacccaaatctcatcttgaattgtactcccataattcccaaatgttgtgggagggactcggtgggagataatttgaatcatggggtaaactttcccccatactgctctcatggtagtgaataagtgtcacaagatctgatggttttatcaggggtttctgcttttgcatcttcctcattttctcttgccactgacgtgtaagaagtaccttttgcctcctgccataattgtgaggccttcccagccatgtggaagtgtaagtccaattaaaccactttttcttcccagtctcgggtatgtctttataagcaatgtgaaaatggactaatacagtaaattggtaccaatagagtggagtgttgatgaaaagatacctgaaatgtggaagcgactttggaattgcccaacaggcagaggttgaaacagtttggagagctcagaagaagacagaataatgtgggaaagtatggagcttcctagagacttgttaaatggctttgacccaaagcctgctagcaatatggacaataagatccaagctgaggtgctctcagatggagataaggaacttgttgggaactgtagcaaaggtgattcttattatgttttagcaaagagactcacagcattttgccatgccctagaaatttgtggaactttgaacttgagagatgatttagggtatctggtggaagaaatttctaagcagcaaagtattcaagaggtgacttgagtgctgttaaaggcactcagttttataagagaagcagagcagaaaagtttaaaaaattttgtagcctgacaatgtgatagaaaagaaaaacctattttctgaggagaaattgaagctggctgcagaaatttgcataagtaacgagaggccgaatgttaagccttcaagacgatgaggaaaatgtctccagagtatctcagaggtcttcacagcagcccctcccatcacaggcctggaagcctaggagaaaatggttttgtgggccaggcccagggtccccgtgctgtgtgcagtctagtgaccaggtgccctgcatcccagccactccagctgtgactaaaaggggccaaagtacagctcgtgctatggcttcagagggcagcagccctaagccttggcatcttccatgtggtgttcagcctgcagatgcacagaagtcaagaattgaagttcgggaacctccgcctatatttcagaagatgtatggaaatgcctggatgcccaggcagaagtttgctgcaggggcagggccctcatggaaaacctctgctagggaagtgtggaagggaaatgtggggttggagcctccacacagagtccctactggggcactgcctagtggagctatgagaagagggccacagccttcagaccccagaatggtagatccaatgacagcttgaagcatgtgcctggaaaagccacagatactcaacgccagcccatgaaagcagccagtgggaggctgcaccctgcaaaaccaaagcagcagaggtgcccaagaccatgggaacccacctcttgcatcaatgtgacctggatgtgagacatggagtcaaaggagatcattttggggctctaaaatttgactgccctgctggattttgagcttgcatgggccctgtaaccacttcgttttggccaatttctcccatttggaatggctgcatttacccactacctgtacctgcattgtctctaggaagtaactagcttgcttttgattttacgggctcataggtggaaggaacttgccttgtctcagatgagactttggactgttgacttttgggttaatgctgaaatgagttaagactttcagggactattgggaaggcatgattggttttgaaatgtgaggacgtgagatttggagggcccaggggggaattatatggtttagctccgtgtccccacccaaatctcatcttgaattgtactcccataattcccacatgttgtgggaggcatttggtgggagataattagaatcatggggcagtttcctccacactgttctcgtggtcgtgaataagtctcacaagatctgatggttttatcaggggtttccacttttgtatcttcctcattttctcttgccaccaacttgtaagaagtgccttttgcctcctgccatgattgtgaggcctccccagacacatggaagtgtaagtccaattaaacctctttttcttcccagtcttgggtatgtctttatcgccacatgaaaacagactaatacaaggttattctatgagttagaaataattcctctaaaagtaacacttgctgagaatttccctaccttttctgggcttttaaaaatgcatcttattcctcatcccctaaagtgggtgtgttagtcagggttctctagagggacaaaactaataggagatatatatatatatatctcctatatatcctatatatatatagtattaactcacatgatcacatggtcccacaataggccttctgcaagctgaggaacaaggagagccattccgagtcccaaaactgaacttggagtccaattttcaagggcaggaagcatccagcatgggagaaagatgtagagtgggagtctaggccagtctcatgttttcacattcttctgcctgctttatattctagctgtgctggtagctgattagatagtgcccactcagattaagggtgggtctgcctttcccagcccactgactcaaatgttaatctcctttggcaacaccctcacagacacacccaggatcaatactttgcatccttcaatctaatcaagttgacactcagtgttaactatcgcagtgggtaaaagccattactaggcaacccaaccgttgctgcaggttgatgcagcaatgagtaggaagatgtggtgggaagatgtgggagtataaacttcgccaggcagtaatataggtatataatacatgagcagggctgcaatactctcttaggaactggacagctttatgggccaaaccaaacctcaaaacccagctgcccacctgacacaagactgtccatgggagtgaagttctgcagggttctttcccatcattatcccaggggaagagttactctagagaatgcccacttaaaaggtatgtgagtctgactctgcagatcacccactgtctacacagctcttgtttctgaagagctgtccttgcattgtcaataccttggtgcaacatatgtggcttcctgcccttctgccaagtggacctcctcactttgagcacatggtaagcatcctccataggtacacaaagtttgtagcaactaactcctatctggagttactcagacccactacctctcctgttagtgcatctatgctcttcacaaagtacagtaagctctgcttcacttgtcttgaaaacatgaatttgttctaatgcaatggacatattggagaagaatttgatgaacagctaaaaaaagcaatagtataaataattttcatggctctacatgtaacctctggaatgcataacaatgcttttttccataagaagatgtttttctgtgcttgtagattattcttttagacctgtaaagaatgcttggaaataattgatgaagtgccaagtccactaagtttctgtttttagcttctatcctgaagtttctcatattctttacctttacatctctcagtgtgagctcatatgaatctgtggcttcaggtcccatgtatatactgatgacacccaaatctcttcttgaatgaccaaagaccaaactttctgagtcacagatttttatttacatctgaatgtacccctagtattttaaatttcttaaatataaaagtttaatatttctcatacccacttatgtatatgcatgtgtgagtgtgagtatgagtgtgtgtaccacatatacttactatgtgtgttaggcattgtcctatatgtttcatatctattaactcattaattccccaaacagccttatgagttaagtcttctcattatgtccttataataaatgaagaaactgaagccaagggattaagtaacttatccaaggtcaatgaaggagctgagatttaaatccagaaaatctaattccagaggacaaccattttccaaacatcatgcaatccaacaaggtgaaagcctgtaaggattatttcaattctttatttgaatctctgcttcagcaagcacattcactggaggaaagatatccagcctttggttacagagaaggcatgctctcagaaggctcatatttggtttacagttacttgctcattgatttttgtgagttcctgaaacttacagaactttcttaggtgttcagtcaaattgtaaactattatatgaatagtgtccatcatagttttcatatgaacgttaaccaaggcctctcaatcacaggtggaacatgtgagcataaggttaatatcatcaagtaactggtgataaggctaaaatgatggatgaaagtcagattgtggaataccttaaagggcagaccaacaaggtttaaggactttatcttgctgttggtagtaataattttttgtaccaggagtttgccatgagcttcagaccatgtttcaggaagaatcagttgggcctgtgtgtgtagttcctggatagtagagcatgcacagaccttgagtgcactcactttaggggtcttacagtctggtgctgtggttctccaactttagtgtgtatcagaatctcttggggaaacatgttataatatcctgggagggcttcataccaggactccgtcttcagagattttgtttcagtggaaatggatttaaaaggcagtgagctgcattttcataaacaccactcttgaagatgataatgcaggttgtttgagaaacactgatctagtggctgtggaattgatgtaagtgtcaggcaaaaatggtcaaaagtaggatagttggaaagtaagaggtggaatttcaattctgaatggccatttgagcccacatgttttatttatttatttattgcagattctcagtaaacacacacacacacacacacacacacacacacacaacctacatccatcctgaaaaacaggaaaggtttccatgcagaggtcaaaaactgtgacgtatatctgccatatatagtgcctggaggaccaagctgaggaaagaaaccatcagcttaaaaacccaggcacaaattgaaaagcattcaagaaaagcaagtgcatgggattcctgagaaaaacttcatcaaaccctcaagtgtgaagtagagtaactggaacaaaagcggaagcatgacagtcagcataagtaaacctcaacttaaacagtctcaaggagccagaggtcaccagataagccgcctagggaaatgggttgactgagtctcttgcagtgatcagttcaggataggactgcttaaagtaagaaactatgagagttaatgacagaaacttgtttgggtaatgctcacttttagaaaatagagaaaagacagtcaacagagctgataggaaacttgaaatctatgcagtggcctagaaacaacaacaacaaaaggagtgattttcaggagaatgtggttaaattgccacaagatatacaaatgtcaaacaacatgaagataaagaaaagatcaattgtttggcaagttggtgctcatgtcatctttgtgagagatttcagcagagtggtgtgaacagaagtcagattgagggggtggaagaaatgattaagagatgaagaaatgaagtcatcaaaggttcaacagtctctctgtggtgtgtgtgtgtgtgtgtatgtgtgtgtgtttgtgtttagtagcaaaaaggaaagagggttggtagctgcaggggtaatcagagtagaatatttttatgagccagaggtcttctcttcatgtatggtgagaaaaggaaaggaaccagaaagaatagtaactattcaagatggcgaggagtaaggtgatgattgatgatggatcatgtgttgtgggatcagggtctctttagagttaatataaatcaaatttcagggccatgaagtaagacagtacattcatattttattgtagttaattaattctcttaaaaagggaatataaagggaaggtaatagttgcatatttatagattgtagtctaatatgagctgatttataaaatgttggcattatgtttttgaggtggtaggataaagaaaagaaagtgaaaactttaagtgtagggttgagtttatcaggaatgtgtttgatatagacttgtgagtggtaatctggaatatatctagtatctaaagatactaaagaaaaacaaagggccagtaggccttataggagaaaatggattcatagctcttaagggataaaagtgaaaaaatgacagatcaatatggctgttgttactagaaccattcctttgtttggaaaaagtgttagttactcttaaataatttaatgccaaaacaaaatacaacattaactgaaaaggagaatataaagttatatcaacactataattataattatttaaaattacttatgttgtggataagagttggaaggaaatatttttttttttagaaatatgcaattttgggtaatgtcaaattatttttcttcttcataataatttttgcagaaaaaatctaagtatagctaacattagcttatgaaagtaaggtgttttattcagatctcataatctcagatcttttgaatgggttgttgcaaagggattaacaaaaatgttgcttgctttataccgttctgcataggtagctatacttattaacatgatagatgcaaactggtgttcagttgattataatatattatttttgcattccagatgtcatttcctatgggcaatgagtttgcaatttcccaaatgtaagaatttaattttttcctgctctcgtttctgatgtctttaagatctttgatttttttttctatttagcagcaccaaccgaattttcccataaagaaatatctcattaacccaattattttcccataaataattaacctaattatagactatcagtttctgcattatgaggtatttataaagctgacagaattaagaatgtacattttctcctctgctctttatctgggacaacacgttggtcaaatttctgttatgagtggctttagaatgggagacttccaaaggattatgttgtactggtggcactatatggcaatggggggtgtcagtaggcataagggggttacccttattaacatctttggaagctcagaattaaatctatgtaatttttatatgctattgctcctcctatagaactctgggtctcaaccttttgtctgtgggcaaaagttcacatgcacaacaccatctaggttggtctgtgttgcacatggctgctgaagatgtaagagagactgtggattctgtgctgtttctcaggccctcactataatccatcgtttgccctcccatagacttgaattatgacaaccaggctgggactcatgctatgtagaagacctttctggagatgagttaaagatacgtagtccaagcattgtggcaggagccattctttaatagtttcatgtcttatctgtaaataatgttgtttactacaaagcataacctccaacttaaatcttctatactaagttgtgagcaaagaattgagcacacaacagcaagatctaggttactcctttcccctccattcacgtaaaatcttatgtgaatgagtatgtgattcagttactgaatcagtaaactggtcaataattcacttatttcacctaagaagaaacatattcttttttaaaagcactgaatattatattgatgttggtattataatacaatggaattgtgtctacctagtacccttatttctagatctcaagtgactaaacagcctgaatctggaaatacagagaaaaaatacacaaagagtcgtgaatttaaatagcaattctgtcactaactggctgtttaatttgagtgttttatttaagctgtgtaaatccaggcttctcactgaaaaatagagataatacatagattatagcattatattgtgaaagacacaagatagtgaacatatagttctttgccctgtatctggtacatagtaggtgctcaaaattactagttttttaaaaataattatcctcattatttggtgtcttcaatgaccttcttacatagtccattatgataataaatgcaattaattttttgttcatgacaccctgaaggtgtttctgtgtcagattcactcagagacctcatgatgaggaaggaacatggtggcgaatcttaccctggtgatgccaaacacagcagtgactcataaccattccagcactgcctatgaaatggatcaattaaaggacggtgacacacaaagatggctacttccagagggagaccttggaaattcttttatgttaacagtgtaccccacacaagaataggagaaccacattctgtcagtacactggggaagttttttcaaaatatctctggactgtgtagatttctggtaatagaaaatatgatctgccacttcaatctactgaatactgtccgtttttttctatataatggcttttaggaactgttgtgaggcatcctaagtattatctagccatccatccatccatccatccatccatccatccatccatgtatctatctaatctatgtgattatatgtgtagagcttattcatacatatatatatacacacacatacatacacacatagttatatgtatttatacacacatatacatataatgtctttatcagcctgaagtatggatttttaaagtggtaatattgccttacttattgtttctcatccactgtgacattctatgttatttcagtaagatttaacaagcaaagtgatgatggatgagagttcctttgcagcctggtgagatttttacttcatgtaaagcaaagcattttggggcaacatcagggataaacttgtggaatgaatcatttggtttttctttagtatatcctgtccaccattgggaaccagattcagtaattatgttctctggtttgtactcatcataatgtcttgacctccagctctgaaacaacatatttcctgagagatgctgattgtattttgtgaggttctgcagggtcaagtaaattgaggatgtctttattctgcatttgactaatctgaattagatagtcttagccattaaaactttagaaagcacataatgaccaattacaagtgagagaatttttttcaataatgctttatattttctaagtaccgatacagatgttttattacatttaaaacatgattgccctaccacttcacttatattttaaaaactaagttgccatcttgtaaaaataaatacatggatatcatttacaagtgatatcagttaatacctaatgtgaacatccattgtgtactgagtctatgaaatactactagttactatgaaaatgtgagattcaccgaatcgggtggagcatcaactttattatccacataggttacccatttcttatatcatagctttggttgtataatttatttcaacagagtttagttaaacattttccactgttattaggtactgccactctacattccagtaaatattgccaccatgttgcagaacaatttttggacaaccaggcatatctttggagttgaactatgtggaggtactactggtgctgtgagggatcacctgtaaacctggcagttttaggtggcctctagacgttatagggtcaagggagaaattttttttgttcttgttgtttaatactgtgagtacatttaaatgctcatgtaaaagagccaacttagagggagtggttgaagacacaagagagataagagctgattgttatggcaaggtctctggctaggcagaagtgaatgggtcgaagagaacagatttaggaactgaccttctatcaggagaacaatatttcttccaatgtcatgggggaacatagagactcagggggtctgtaaccatgtatggcccccaaaggactggacacatggtgagcaactatggtaggatgaagggaggcatgttaggaaatgtccagctccgaggcctccacgtgacccctaggtgagaagctgccatgattccttaatagggagcaacacaaagactaaaatgatggcaatgtaagggttaaggaaaaggtgattttaaaagcttcttgagggtaaagtccatctgtgttcacttttgtgatctttgttgcatccttctcaatcttgcatattgttgatctcaaataagtttatggtatttattatgttcaaaaaagttacagtttcttaagtttcttctattttcttaaggaaggaggtgataggatggagggggcatgatgccaacttgactctcctgcttaggacttgcccttcttttaaatggtgaacacagagttacattatttaatgcataatgtgaaagtgacagaggccctgattattggagtataaaattttatattattatggaggctaaaaagtacatgactggactttttcatacaataattcaaagtaagcccatggaacatcctcttcaaatgaagttgacgtacgtctcatctccctggattggatgcccaaccctcacccttgaaagcagcttgtggataactcagggcaaacagaagcagaaccctcatgaaccttctctcttctggaaattttggatggcgttacagaatgaggcaaaaataaagttaccttcttctcttttcttggattaaagatcccagagccattctcctctgtgttctctacttggaccttgtatagtgtaggatatagccaggaactaaggatcctcggttgactcatagtcggcagagggtgttatggccctcctgagagagtgaccttgaggagagaatctattcagatggttttatgacaagaccaaagtaacatttcttagttacctcttagccagagtttagtgttaagtttgccctgaagtatagttttcaaaataatgagatcaggcatatgctattttgactaagtagaatacccaataaaataagtcattcaagttgtgactgaaagttcggatggtccttatggaatcaaggtgaccaaataacatgatactaaaccagaagtgagtcatgttgtttatcatactgtttttataaattttgtataatacaaccccatacgaccccacacagttcaaaacagtagtggttactcactccatggagaagatgtcaaaagtaaaaggaataatacattggttatgatgtctgaaattgggcacataagcatttagttttgttggtgaataatgttcagaatgaaaattgacacactctttggattatcaagctttttaaaaagtataattaatcagttttttaatgaaatatacagaaatataatggcagctcttctattagtgaagtttcctgaggcagctggattgattgaaggctttacctggttcatttggattctacttgtaaagcatgaagaaaccaactttagggtcaggaattttccataagtcaggttttttttaaaagccatataatcgatgcagatatcaaaacattaagatgagataaaaatagcttttaatcaagtaagttaaattaaataactgttaaggttcaaatcatgaattaaatctagatgtttggcaaagacaaaaatctttataaaaggataaaatagtctgggaataaagtatttgtcattcccatatcaaatgagaacaaaactaataattttattaactttaggtttttattgtattaaataacatcatttttatttactttatcacaaggtatatttttctttattatatgtctttgtagaaaacctagtaacattcctgtgtgactgaatagattaatcacagatatacccatctggaaaaatgcatgctactataagagatgagtgaaatatataaaatttatattttaattcttatgctaattagttaaatgggggaagatgtatgtccagaatatttgctcttaataggacatcgtagtgaaaaccattccaatgatgatgactaataaatgtgtatcttcaacattgtataatgcccaggaatatttccaaataaagaatttctaggtaagatgtttaacaaatatatgatacttttgttttctgggtgaatgttcaaactaatttcctggggatcattgtgctcagtacttatagtatcattaatattattgttgacatataataataaccaaaaatatcctggtcagataggttttttcttttttagctgattcataatcattgtacatatttatggggtacagaatgatatttcaatatgcgtatacaatgtgtaatgatcaaatcagggtaattagcgtatacatcacctcaaacatttgtcatttctttgtgttttgaacattgaaaatcctctcctctagtttttgaaaatacacaatggattatagctaaccatgtttacccaacagagctacagaacaccagaactcattcctctcatctagctataattttatatctgttaaccaactccttcccatcctcctcttcccccatccttcccaatctctaatacccacaattctactttactaccatgagctgaattttttattttagctccctcttatgagtgagaatgtgcggtatttatctttctgtgcctgacttatttcacttaacataatatcctccaggttcatccacattgctgagaatgacaggatttcattatctttttgtggctgaatagtatttcattgtgtgtatataccacattttctttatctatttgtctgttggtagacattaaggttgattccatatcttagctgttataagtagtgccgcaataaacatgatggtagaggtatccctctgatatattggtttcctttcctttggatagatacccagtaatgggattgctacatcatatgttagttctatttttagtttttaaagaaatttccagattgttttccataatggctatactaatttacatttgcaccaacaatgtataaaagttgccttttctctgcatctttgccatcatttgttattttttctttttcataatggccattctaactggggtgagataatatctcattgtggttttgatgattagtgatgttcagcattttctcatatacctgttggccatttgcaagtcttttgaaaagtgtctattcagatattttgcccacttttgaatcaccttatttgtttttttctgttgaattgtttgagttccttgtatattctggatattagtccattgtcaggtgaatagtttgcaaatattttctcccattctacaggttgtctcttcacactgttgattgttttcttttctgtacagaaactttttagtttaatatagtcccatttgactattttcgtttttgttgactgtgcctctgaagtcttagccaaatagtttttatttccttcaaatagctttggcatttgagtaccacttcgctcattccagaaaagcaaccacccaaccaaaagaataggtttttaatttttttttaattattattatactttaagttttagggtacatgtgcacaatgtgcaggttagttacatatgtatacatgtgccatgctggtgtgctgcacccattaactcatcatttagcattaggtatatctcctaatgctatccctcccccgtcccctcacctcacaacagtccccagagtgtgatgttccccttcctgtgtccatgtgttctcattgttcagttcccacctatgagtgagaatatgcggtgtttggttttttgtccttgcgatagtttactgagaatgatgatttccaatttcatccttgtccctacaaaggacgtgaactcatcattttttatgtctgcttattattccatggtgtatatgtgccacattttcttaatccagtctatcattgttggacatttgggttggttccaagtctttgctattttgaatagtgccacaataaacatacgtgtgcatgtgtctttatagcagcatgatttatagtcctttgggtatatacccagtaatgggatggctgggtcaaatggtatttctagttctagatccctgaggaatcgccacactgacttccacaatggttgaactagtttacagtcccaccaacagtgtaaaagtgttcctatttctccacatcctctccagcacctgttgtttcctgactttttaatgattgcctttctaactggtgtgagatggtatctcattgtggttttgatttgcattcctctgatggccagtgatggtgagcattttttcatgtgttttttggctgcataaatgtcttcttttgagaagtgtctgttcatggccttcgcccactttttgatggggttgtttgtttttttcttgtaaatttgtttgagttcattgtagattctggatattagccctttctcagatgagtaggttgtgaaaattttctcccatgttgtaggttgcctgttcactctgatggtagtttcttttgctgtgcagaagctctttagtttaattagatcctatttgtcaattttggctttggttgccattgcttttgatggtttagacatgaagtccttgcccatgcctatgtcctgaatggtaatgcctaggttttcttctagggtttttatggttttaggtctaacatttaagtctttaatccatcttgaattgatttttgtataaggtgtaaggaagggatccagtttcagctttctacatagggctagccagttttcccagcaccatttattaaatagggaatcgtttccccattgcttgtttttctcaggtttgtcaaagatcagatagttgtagatatgtggcattatttctgagggctctgttctgttccattgatctatatctctgttttggtaccagtaccatgctgttttggttactgtagccttgtagtatagtttgaagtcaggtagcgtgatgcctccagctttgttcttttggcttaggattcatttggcaacgcgagctcttttttggttccatatgaactttacagtagttttttccaattctgtgaagaaagtcattggtagcttgatggggatggcattgaatctttaaattaccttgggcagtatggccattttcacgatattgattcttccgacccatgaacatggaatgttcttccatttgtttgtatcctcttttatttccttgagcagtggtttgtagttctccttgaagaggtccttcacatcccttgtaagttggattcctaggtattttattctctttgaagcaattgtgaatgggagttcactcatgatttggctctctgtttgtctgttgttgctgtataagaatgcttgtgatttttgtacattgattttgtatcctgagactttgctgaagttgcttatcagcttaaggagattttgggctgagacgatggggttttctagatatacaatcatgtcgtctgcaaacagggacaatttgacttcctcttttcctaactgaataccctttgtttccttctcctgcttaattgccctggtcagaacttccaacactatgttgactaggagtggtgagagaaggcatccctgtcttgtgccagttttcaaacggaatgattctagtttttgcccattcagtatgatattggctgtgggtttgtcatacataggtcttcttattttgagatacgtcccatcaatacctaatttattgagattttttagcatgaagggctgttgaattttgtcaaaggccttttctgcatctattgagataatcatgtggtttttgtcttcggttctgtttatatgcttgattacatttattgatttgtgtatattgaaccagccttgcatcccagggatgaagcccacttgatcatggtggataaactttttgatgtgctgctggattcagtttgccagtattttattgaggatttttgcatcaatgttcatcaaggatattggtctaaaattctcttttttggttgtgtctctgcctggctttggtatcaggatgatgctggcctcatcaaatgagttagggaggattccctctttttctattgattggaatagtttcagaaggaatggtagcagctcctccttgtacctctggtagaattcggctgtgaatccatctggtcctggactctttttggttggtaagctattgattattgccacaatttcagatcctgttattggtctattcagagattcaacttcttcccggtttagtcttgggagagtgtgtgtgtccaggaatttatccatttcttctagattttctagtttatttgcgtagaggtttttgtagtattctctaatggtagtttgtatttctgtgggatcattggtgatattccctttatcattttttattgcatctatttgattcttctctctttttttctttattagtcttgctagcggtctatcaattttgttgatcttttcaaaaaaccagctcctggattcattaatttttgaagggttttttgtgtctctatttccttcagttctcctctgattttagttatttcttgccttctgctagcttttgaatgtgtttgctcttgcttttctagttcttttaattgtgatgttagggtgtcaattttggatctttcctgctttctcttgtgggcatttagtgctataaatttccctctacacactgctttgaatgtgtcccagagattctggtatgttgtgtctttgttctcgttggtttcaaagaatatctttatttctgccttcatttcgttatgtacccagtagtcattcaggagcaggttgttcagtttccatgtagttgagtggttttgaatgagtttcttaatcctgagttccagtttgattgcactgtggtctgagagacagtttgttataatttctgttcttttacatttgctgaggagagctttacttccaactatgtggtcaattttggaataggtgtggtgtggtgctgaaaaaaatgtatattctgttgatttggggtggagagttctgtatatgtctattaggtctgcttggtgcaaaggtgagttcaattcctgggtatccttgttaactttctgtctcgttgatctgtctaatgttgacagtggggtgttaaagtctcccattattattgtgtgggagtctaagtctctttgtaggtcactcaggacttgctttatgaatctgggtgctcctgtattgggtgcatatatatttagtatagttagctcttcttgttgaattgatccctttaccattatgtaatggccttctttgtctcttttgatctttgttggtttaaagtctgttttatcagagactaggattgcaacccctgcctttttttgctttccatttgcttggtagatcttcctccatccttttattttgagcctatgtgtgtctctgcacgtgagatgggtttcctgaatacagcacactgatgggtcttgaccctttatccaatttgccagtctgtgtcttttaattggagcatttactctatttacatttaaagttaatattgttatgtgtgaagttgatcctgtcattatgatgtcagctggttattttgctcattagttgatgcggtctcttcctagcatcgatggtctttacaatttggcatgtttttgcagtggttggtactggttgttcctttccatatttagtgcttccttctggagctcttttaggcctggtggtgacaaaatctctcagcatttgcttgtctgtaaaggattttatttctccttcacttatgaagcttagtttggctggatatgaaattctgggttgaaaattcttttctttaagaatgttgaatattggcccccattatcttctggcttgtagagtttctgccaagagatctgctgttagtctgatgggcttccctttgtaggtaacccaacctttctctctggctgcccttaacattttttccttcatttcaactttggtgaatctgtcaattatgcgtcttggaggtgtgcttcttgaggagtatctttgtggcgttctctgtgtttcctgtatctgaatgttggcctgccttgctagattggggaagttctcctggataatatcctgcagagtgttttccaacttggttccattctccccatcactttgaggtacaccaatccgacatagatttggtcttttcacatagtcccatatttcttggaggctttgttcgtttctttttattcttttttctctaaacttcccttctcgcttcatttcattcatttcatcttccatcactgataccctttcttccagttgatcgcattggctcctgaggcttctgcattcttcacgtagttctcaagccttggctttcagctccatcagctcctttaaggacttctctgtattggttattctagctatacgttcgtctaaatttttttcaaagttttcaacttctttgcctttggtttgaattttctcctgaagctcggagtagtttgattgtctgaagccttcttctctcaactcgtcaaagtcattcttcgtccagctttgttccattgctggtgaggaactgcgttcctttggaggaggagaggggctctgctgtttagagtttccagtttttctgctctgattttccccatctttgtggttttatctacttttgatctttgatgatggtgatgtacagatgggttttgggtgtggatgtcctttctgtttgttagttttccttctaagagacaggaccctcagctgcaggtctgttggagtttgctagaggtccactccagaccctgtttgcctgggtatcagtagcggtgtctgcagaacagcggattttcgtgaaccgcaaatgatgctgtctgatggttcctctggaagttttgtctcagaggagtacttggccgtgtgtggtgtcagtctgaccctactggtgggtgcctcccagttaggctgctcgggggtcaggggtcagggacccacttgaggaggcactctgcccattctcagatctccagctgcatgctgggagaaccactgctctcttcaaagctgtcagacagggacatttaagtctgcagaggtcactgctgtctttttgtttgtctgtgccctgcccccagaggtggagcctacagaggcaggcaggcctccttgagctgtggtgggctccacccagtttgagcttcctggctgctttgtttacgtaagcaagcctgggcaatggtgggcgcctctcccccagcctcgctgccaccttgccgtttgatctcagactgctgtgctagcaatcagcgagactctgtgggcgtaggaccctccaagccatgtgtgggatgtaatctcctggtgtgccgtttttttagcccgtgggaaaagcgcagtattcgggtgggagtgacctgattttccaggtattgtctgtcacccctttctttgactaggaaagggaactccctgaccccttgagcttcccaagtgaggcaatgcctcgccctgcttcggctcgcacacagtgtgctgcacccactgtcctgcgcccactgtctggcactccctagtgagatgaacctggtacctcagatggaaatgcagaagtcacctgtcttctgcgtcgctcatgctgggagctgtagactggagctgttcctatttgtccatcttgtctcttcctcgatttttttttcaggtttttaatttttttaattcatattttgatattcttcttaatgctagatgtaagtaaattagatttttccctgttaatattttataaaccattttttcttttaatttagtgagagtgacagatagaatgatttactctgaattactcttcctcttgaaagattaaagcttgctcttaagtaaagtttgttatgcctatctgttttgtcttcggtttatttttttccatggagctgcttcttccttcttacaaaatgaagttctggaggaccaacaggtcactacatgtattcatagttatataaattctagcaatggtaacagtttggctcatgttggggcctggctacatgttcttcattcctgtttaataaatctcatctttctaccatatgctagtaatatatggctggaatgctggtatgggaattactcccctctttgctgaaatagttcatctcttgtgtccttttcccctttttattcttctattcttcttagcctaagtgatggttgtgattgaattcagaagtttgatattcctactcggttcatgtccacccaaaagcagagaggagcccatcatcatcatttgttttgaatctgaatcccaagcaggaaaaataactccaaggctcttacttaggctgtcgtgtctgttctgtcatgcggtgagtcagcaacactgactgcatttattcttctgggaattgttcttctaggagctgtagtagtcatggtacctccctgcaggagttcatgaattaataggactcatagtgcaaagtttctctgagaattttctataacacaaactccttaacttcctggtgggtaatgttttctgggtgttttttctgttttctgtttttttttttttgtcatttcttctttagtaaaatgaaaattgcaagtagaaaagaaactaaaaatggatttagtgtgaggacaggttccttttcctggcaggattgtagaacactggtattcagttgactgtttacaatgaatatatcttctggttggtcatggccagaagagaaaatgtcattggtttgtgcccaagcaaattgattattaaaatacgttgaatatgaccccatggttgcaaacatcccttttcttagtaattcttagagatgaagaaagtcttttatctgttttctatttcaactttctgggtaatctctatcctttctttttgataagtctctgtcttccctctatcagtgtgaataatgttactattgaaaaactggttccctagctacctcagtcctggggtcttaaggtttcttcaaaacgtgacagtcatgttaaaatgaaattctctgaatttatttagagcactgtttgtaaaagtgtaagtgttattatgcagccttgctttcctacctacctgaattctctcccctactctccccaactcatattgccagcagtgggtagctggcaggatgtttgaaagatttcttcttcacaattcaaaaggcttggtcgagtgacaggattcatatcccaaacctcaacatcacacaatactcccatgtaacaaatctgcacatgtacccactgtattgaaaataaaattaaaaaaactaaaaaaaagcaaaaaagcaaaaaaacaaaaaacaaaacaaaacaaaatccctggtatatattaagagtcccagtgacctacttcacttgcaaattaatggccatctagagtgtggagtttggttgaatgatttatactgcattgtgattctaaaaattaattatttttaatttctttgatactctagatcagttttctaaggtaaatgtgaagtacatcagtgactccaaactcaattgaggtctcccgattttcttggactgactatgtatattttaaagaattatttactttcatactttgccaagacccagacagaaagaagctttcagtgttcgtggcagcagaaaagaatactaataagtgttagtcatccacagtaaattaaaaatataataataaaggaaaattaaactgctgtgtgtttgggtgtttgctctatcaccataaattcacaacctcatcttctagtctctgaaaaggagtgggtgtggcaggaagcatttgtgaaattccattagcatttttagagacaattactccactaaatgattcagaattcagctcctagcttctaagattctacttaggcttatgaagcattttattctgcaacagagtatacatataatgtagaattcctaggattgaaaaacttgttagcttccaacccaaattctcttacttttagatgagaaaatgctgatgattggcctaaagtcttatatctactggtggaggagtggaaattcactcgtttaccttcgcactggaggtagattcaaaatacttcagaaacgatgttagactagagcataatgcttggccattgataaataaataaatgaatataagatgttgtgccctgagattcagaattggcagcaagaatgtgggtattataaaggtatatttttcttcttgccttattattgaataagagtacttgaaaatggatgaaggcaaccagatgttgagtcagatttcctgagctttgaattttggacctgcattcatttcatttctctaggaaggttgcccccctctttatttgttcagtgcttataccagattttattatactggagatttctaaagcctccaaccaaggaagattccctgacttctgccttgctgctgcaccacacaaataaccatatcaatttatattgcactattctcaaccccacaaactccatttagacctaacagctatggacagtggccctaatttcctaggaacatgatcattttgttcttgtttggtgtctatgccaagctccaaatcacaaaaagctgttaattccaattaccttttgcaaaatccattttgaagtcttctcacagatggatgtatttaaaacacctagaaggttaacatcctttgtgaggcctcagctttgacttagaaaaagctcatgccacagtgtgtatgtgtgaacctatttcctaagagctgatatatgcccatggtgtctcactgcagggctggtgataaatgatgaaaccatttagtgcataaactcatataacctttcagcagaatcaataatttagttgcaatttagttgcatacctaaaacaatgcaaggttgaagaaccctgagaagagtggtagctcctgatgacagaaataggagtctcaggtattcttcttttgtttcccaagtggtatcaagcatgtgtctgactcactggtgctattttacattgtgaaggaagtatggatgagggaaggcaaaaccagtgcaaatattctagatccacttatttccttcccgctttcccttcctctcttcccctccttcctttcttcttctcttttatctcttccttcctaaattaatatttttgagggtaggtaaaatagctatattacttaaaagtcaaactttataaaaaggtaaagcggagatgtctgtctcccaatcccatctattcctccttcaccctgttccccatctatgagaaattatatttattagtgtcatgtttattttttcagtgtttctatatgtaatactcattatatgttatacaaacacaaatatacatatacataatttccttccatttttatcaatttccttcctttctcactgtcctgctcctagctttaattttaccaattartaaaacatactaaagatttttttcatatcagtgcatgaagcttttcctcttttttctttcaactgcataatattccactatgtggaaatatcatggtttatttaaataaattcttatcagggaatatttgagttgttccagggttttctttctttctttcttttttgctgtgaaaaacaatgttacagtgaataactaacatcatttctcatttcatatgtgtacaaagtatctgtgggatagagttccagaactgaaattgctgcttgaaagggtaaattgtttctgtggatttgtagaaatttccagatttccctttatagtagttacaccattttataatcctacagcaaagtctgaaagtgtatttttcacacatcctttcaaaaacattcaaactttggatttttgtacatctaattggtgagaaatgatatacttgttttcattttcaatctattcttatagatgaacctggacatattttcataagtttaataaccatttgtttttctttctcggtaaaccgtatttcctttgctaatttttcactgggcatttggtgttgatttctgtcaaatctttacaaagtagagaagtttgtactttgtttatgatctgagttgcaaatacttttattccttccttgacatttatcatttgccttaacttatggtgaatttttaccatgcaaatgtttttgattttcatgttgttcagtatgtcaatatattttatattcattacattcattagtggctaaaacttcccaaatgttggtaggaatatggatgtctagattagtgaggctcaaatgctccaggcaagatcaacgcaaaaaatacttttcctagacacattaaaatcaaattgtcaaaatcaaagacaaagtgagaattctgaaagcagcaagagaaaaactactcatcacatggaagggtactcacaaaggctacaagcagatttctcagcagaaactttgctgggcaggagggagtggaatgatgtattcggagtactaaaagaaaaacaaaactgccacataagaataatgagtctgtaaaagctgtactttagaaatgaagagacataaaatcattcccagagaaaagaaagctaagagagtttatttccactagacctgccttaagagaaatgccaaagggagttcttcaagttgaaatgaaaggacccgaagtaacatcatgaaaacacaggaaatcccatagctaacatcatactcatgttgtaaagccaaaagcttttccattaagatcagcaagaagacaagggagttcactctcaccacttctattcaacatagtactgggagtcctagccagggccactaggcaagaaatggaagtaaaaaatatccaaattgtaaaggaagaagttaaattgtctctatttgcataaggcatggttttttataggaatctctaaaaacttcatcaaaaaacttaaaattaataaattcagcaacgttgcaggatacaaaattaacatacaaaatccagttgcatttctgtacattaacaacaaactatttgagaaagaaattacaaagacagtccgtttacaatagcatgaaaataataaaatacagaagaataaatacaaccagrgatgtgaaagatctgtacactgaaaactataaggcattgatgaaagaaatttaaaaatacacgaatgaaaacatattttatgtctatgtattagaagaattaatattgttaacatgcctttactgtccatgtaatatacagattcaacccctatcaaaattccaattgcatttttatataaaaatgtgttgggtacattataattctattctagctatttgaaatatataataaattattgttaactatagttttcctactgtcctatctaatgctagaacttattccttctatttaaccatatttctgtatctattaaccaacttccaggctgtgtgttgacagtttttctaagagttttcccaaggcaaagagtaagtggaagtcaatcttaaatcactgtgtctggccgtgacccgtgataaaagatttaatggaaaatttcagtttagatgagggtaacagacattcatcagatactgggtgctggagatagattcagagctaagtaagaaatcctatttttgagattaagtaatctcacttcacacccagtgacactgcaactgttgattaagagttttccagtctctttttatccccgttagcctacaggagcaggtaaatatctagttccttctgggtctgaagattctgtaaacttaaaaggagagatcctttctgatttgtatattattggattttctaatgtccatcacagcaccggatttaacactcacacacatgcacacacacacaggatatattgaatgagtaaataaataacagacaggagagttgttactaactgatctctaatattaccttattgttctaataactgtggatttgatataactttgggagcaagcaaggtatcagtcttaaagtatagacaaatttactatgtcacctcagatactcaaatagagaatatcctatgcccaaatggcaaggctgaattgayccaagtgattaagtcatactcttaaaactgtataacctaataaccttttattaagaataagttcagaaaaacagttcacaatttctttttacttaaattgtatatattatatgtgcagttttcagatgtgaatgggatttgagatcagaaaggcagggcttcatactgcatttctccaacttgctctctatttgtcctttagcaaaagacaatctttccttctttactttttatttgttaaacacacacacacacacacacacacacacacacacacacacacacacacacacaacttcatagcatccaatgagcagtatctaggtacacggccaatgcaaagcactcattttcttatttctccttcacatgtttttcattcctattttccatctttgccatggacaagacttcattccctagctgtggctttagaataacagtatgactagatcatattcatttttagcttagcacattacctcccatttagttgaaatgaatatcaacaagaattcacacttctaaatgcttgaaagcacaatgtccatccaagatccaagtgactgaaataataagagccttgttatatgaagaaatacccattttcatgatgttttctgaggcattaactgttactctgaaaagaaagaagagtgttggtaagacttgggtatgagataaaacaattagatatttgcttataaactggaatgaccttgtaaatggcccaggagcaatgtaattaaataccataaaagctcagaattccattgtgccccctggaaacatcataattgcctcagtcattagctttcagggtttcagccttaaaccaggatatttctagtctcatcaaaactatacattagcattcagtgacttgtaagagtaaacttccttctagatagtcctgtgtgcttatgaagtacatccaaatgaacatatgacatgaggtggagtacaacttaaagttgccttctttcatcctatatatttttgtttattcttaatgtatcgtgaacttcagtagagagcaaacaagttgtctttataatttgaagttttgctttctctttttgaaagaaaacgcataatttggagattccatctgtgaaaaaaacttaattaaacaatgttaatttttaaaattctattatgtataaggtgtaaggaaggggtccagtttcagttttctgcatatggctagccagttttcccaacaccatttattaaatagggaatcctttccctattgcttgtttttgtcaggtttgtcaaagatcagatggttgtagagtgtggagttatttctgaggcttctattcttttccattggtcataaaaaccctagaagaaaaactagaaaataccattcaggacacaagcatgggcaaaggcttcataactaaaacaccaaaagcaatggcaacaaaagccaaaattgacaaatgggatctaattaaactaaagagcttctgcacggcaaaagaaagtatcatcagagtgaacaggcagcctacagaatgggagaaaatttttggaatctatccatctgacaaagggctaatatccagaatctataaagaacttaaacaaatttacaagaagaaaaacaaagaaccccattaaaaagagggtgaaggacataaacagacacttctcaaaagaaggcatttatgtggccaaaaaatatataaaaaaaagctcatcatcactggccatcagagaaatgcaaatcaaaaccacaatgagataccatctcacgccagttagaatggcagtcattaaaaagtcaggaaacaactgatgctggagaggatgtggagaaataggaatgcttttacactgttggtgggagtgtaaatcagttcaaccattgaacttgtagatagacaacttgtagatagacagattccattgtggaagacagtgtggtgattcctcaaagatctcaaaccagaaataccatttgacccagcaatctcattactgggtatatatccaaaggattataaacaattctcctataaagacacatgcatatgtctgtttactgcggcacttttcacaatagcaaagacttggaaccaacccaaaagtccatcaatgatagactggataacaaaaatgtggcacatatacaccatagaatactatgcatccataaaaaaggatgagctcttgtcctttgcagggacatcgatgaagctagaaaccatcattctcagcaaactaacacaagaacagaaaaccaaacaccacatgttctcactcataggtgggagctgaacaaagagaacacagggacatggggagtggaacatcacacactggggcctgttagagggtgagggggctggaggaaggataacattaggagaaatacctaacgtaggtgatgtgttgataggtgcagcaaaccaccatggcacgtgtatacctatgtaacaaacctgcacgttctgcacatgtatcccagaacttaaagtataataagtaagtaaataaataagtaaaaagaaatatgttaaaaaattatattatgtagatatttttgttatcttgcttcatgccaagtgctttcataaatgctagacttctatttgtacattttgctttcatgagggtgaagacaaataaagagtgatcattcaaaaatattaatgtacggaaaagtaaagtaactgtagggcttccataacaaaagtacaacaaattgaatggcttaaacaagagaaatgtatgtattgtctcacagttctggaggctaggagtctcaaatcaaggtgccagtagcgttgattccttttgagtaagctgagagaaagatctgtccctggcctttcttcttggcctgtagatagacaacttccttccctgtatgtctcttcacattgtcttccatctgtgcacctctctgtgttcaaataccctccaacttaaaaaaaaaaaaaaaaaaaaaaaaaaaaagcatgtcactcacattgggttagggcctaccctaatgatttcatcttaacttgattacctctgtaaagactttatctccaaaccaaatcacattctaaagtactgggggtgggtgaggatttcaatatatgaattctggggagacccaaagcaatccataaaagtagccatttaaatagaagtatttttagtcttttaacttaaagtctctctacartgttaaaccatgccatcttaatgtgtgttatttagaataatctaaaaaattatatattttcattaacatttaggttaccttcaactttgtttttgatgttttgtaagctgcccataagtgactttaatcactcactgtataccactgacagatcatttctcatgaattcagtgatgtgcactttgagactcaggaaagagggaaacttggccttactaaaatcatatagttagtatgtggcagagctgatattcaactctacatcttgctgcctccaaagttagtgatatatgcatggtcaatattattttaaaatactcatttagtgcttgcctttttaataaaatgctgattttcctgattataagtgtaacaggtgatcactgaagaaagtttaggaaaaaactcaaaacttattcagattaatattaaaattactcataatttcaccatccatagataattgttggtatattatcttacagaaatcgtttataaacatttttattattcaatttatatatttatatctgcagaactacatatgtagttttacttaccaccaaaacttgttgcaaaaaaacatttttacatttgcccagttaaaaatcaccattaatcttagtggagaattattttttaattatttaaaataagaatattttcatttttgcatttttctagagagagcatggcataagccttgtaaagttactcctgaaatttaattttcttttcttatttcctactctctagtcctaagagatgagtggttcaagacagagtgggggtaaggcaacagtcagcactttgtctttgctccactctctggttcatctctgaagcctgatttctctacccaggcatgaagatacttgaataagtagccttttccatccttttgccctgatatgaaaactggtatatctcttgagagaagagcctcaaaaaataatctgagataggaacaagtggaaagcagagatagtctcttctttttaattcacccctcctttggtcacctcctgaatataaaaagaaggacccagaacaacatggtgtccacggcaaccatatctaggtattgcagaattttagagaacccatgaaatcctttcaaaggataagcaggggatctaaatcgtgtcagatgtatagcacccagcacagagctgagggcagaatatgtgcttcatgcatcttttttgtttgatggcaatatcacttcaaggcttcttcagaaagattccatacctacctctccttctcacttctttataatctgtaatttacacacttacctcacaacttttctgggacacattcaatctatcagatatgtaaccacttgtaagctgttggtttgattctgcaagttttggtgtggtaagactggaatcgtacaaatgatatgcttggatcaggtagtccctcgtggtgagtcatgtctaggctcaccccgatgcagtccagtcatgcttcccctatgacttagttgtttgtattgtccccagagtcaagagtgtcccaagtctatgaatcttgctccagagcattgtaatttagcctacggccttgttcacacaaataaatctggcattagttccagctggcagtgatatgggcttggtgattcacttttaggcctcattggagtagagttaaagaaacttcattgtcagaaagagtgagatctctaccatgtgtcttctaagagtgttcagagtgttttttttttttagcgtgcagaagtcctaactttattcctagtaccctccattctctcttttttttattgaaacataagaattgtgcatatttacagggtacatgtgatatttttatacatgtatacaatgtgtaataatcaaatcagagtaattaggttatcagttacctcaaacatttatcctttgtttgtgctgggaacattccaaatctcttcttctagctattttgcaatataaaataaattactattgccaccttatgatactatcaaacactataacttattccttctatctaactgtatttttttacacattaaccaaattctcttcatctcctccctgcttcccttcccaatgtctggtaaccatcattctactttccaccttcatgagatccacttttttagcttccttatatgagtaagaacatgcaatatttgtctttttgtgccatcgcttaacgtaatatactctagttccatctatgttgttgcaaataacagaatttcattgcttttttatggctgaataatactatattgtgtatatatttcacattttctttttttttttttttttttttttttttgagacagagtttcgctctgtcgcccaggctggagtgcagtggcgcgatctcgactcactgcaagctccacctcccgggttcacgccattctcctgcctcagcctcccgagtagctgggactacaggcgcgcgccaccatgcccggctaatttttgtatttttagtagagacggggtttcaccgtgtcagccaggatggtctcgatctcctgacctcgtgatccgcctgtctcggcctcccaaagtgctgggattacaggcgtgagccaccgcgcccggcccacattttctttatccattcatctactgataggtatataggttgcttccatatcttggctattgtggatagtgctgtaataaacatgggagtgcagatatctttttaatacagtgatttcattttttaaaatgtattcccagcagtgagattgctgggtcatctgtagatctatttttaattttttgaggaacctccatagtgtttttcacaggagctgtactaatttacattctcactaacagtgtattagcatttctctttctctacatccttgaaagcattgtttattttttgtctttttgataattaccatttaaactggggtgggatgatatatcattgtgtttttcatttgcatttccctgataattaagtgatgttgaggtttttttaaatacactcattagccatttgtatgctttcctttgagaaatgtctattcatatccttctctgcttttcaatgggattatgtacttttttaccttgtatattctggatgttagtcccttgtcaaatgaatagtttgygaatattttctctcatttaacaggttgtctcttcactctgttgatcatttacattgttgtgctgaagctttttagcttgatgtaattccattgtctagttttgcttttgttgcttgtgtttttgaggtcttacctaaaaaatctttgcccagaccagtgttcttccaattcatgagcatgggatggatatcttttaatcttttgtgtcctcttaaattattttcaacagtgttttatagttttcattccagaggtcattcacttgtttggttaaatttattcccagatgtgtttttgtgtgtgtgtgtaagtattgtaaatgggattactttcttgatttctttttcagattgttcactrttggtatatagaaatgttactgctttttgtatgtttattttgtatattgcaactttaatgaatttgtttttcagttctaacaggttttggtygagtctttaggttttcctaaatataggatcatgtcatctgtgaacaatgatagtttgactttttcttttccaatttagatgcactttgtatcgttctcttgcctaaccgctgtgataggacttccagtgctatcttgaataacagtggtaaaagtgggcatcattgtcttgttcagatcttggaagaaagaatttccatttttccccattcagaatgatgctagctgtggatttgtcatgtaagatctttattgtttcgaggtatatttcttatgtatccagtttgttgacagttattatcatgaaggaatgtcaaattttatcaaatgctttttcagcatctattgaaatgagcatatggtttttgtccttcattctgttgatacaatgtrtcacattgattgatttacatatgttgaattatccctgcaaccctgggataaatcccacttggtcataatgaatatttttaatgttttgttgaattcagtttgcttgtattttgatgaggatttctgcatctgtgttcatcactgatactgacctgtagttttcctattttgttgtgtttttatctagttttggcatcaggataatcctggccttttaggatgagtttagaagtatagtttagaagtattcccttctcttcaatttttttgaaacagtttaaagagaattggtataggttattctttaatcgtttggcagaattcagcagtgaagctgtcagatcctgggctttcctttaataggaggctttattactactgcagtctcatactcattactggttttcaggttttctcttttttcatgggttcaatcttcatggtttgcatgtgtccagaaattyatccatttcttttaggttttcctatttgttggtgtatcaattttcataatcttgtctgttgcttttttttttgtatttctgtagtatcagttgtaatatattctttttcatctctgactttattttttagacttctggttggtgtagctaaaagtttcttgatttttttttcaaaaaaccaactacattttgttgatcttttgtatttttgtagttcaaattttatttatttatgctttgatctttattatttctttccttctactaattttgagtttgattgttcttgcttttttagttccttgaagtacaatgttaggttgtttgtttgaagtctttctactttttgatgtaggtgttgattgctacaaatttccatcctagaactgcttttggtatatcctctaggtttttgtatgctgtatttccattttcatctgtcctaagaaaattttttaaatttcctttttaatttattcattgaccaatttgtttttcagtagcatgttgttttctttccatggatttgtacagtttccaatgttccttctcttattgctttatagttttattcaattgtggtcagaaaatatacaggatatgattttgacttttttgactttttaaaacttgttttgttacctaacatatggtctatcctagagaatgttccatgtgctgttgagaaaaatgtgcattcttcagctatggggtaaaatgttctgaaaatgtctgttaggtcaatttgatctagagtaaagtttaattctgatgtttctttgttgattttcttgtctagattacctatctgctgccaaaagtggagtgttaaagtctcctactattgccttctctgttgtttttaactgtccttgacttaaggtctgttttatctgataattatagctttacttctgctctttttgtttgtttgttttccatttgcttctaatatctttttaaatatcttcacattcagtttgtgaatgtctttacagatgaagtgagtttcttgtagacagcatatagttggatccttttaaaaattcattcagccactctgtcttttaactgaagaatataattcatttatattcaaggtttgaatattattgatatgtaaggatttagtattgctatcttgttacttgttttctggttgttttgtagaatcatttctttctttttctctctctctcttactttcgtttttgtcacaaaataattttctctattaggacatgttgatttctggctacttatttttagtgtatctataataggtttttgctttgttgttactacaaggcttataaaaatatatttataacaggttattttaaactgataatagtttaactttgatgcaaataaacaaaaataaactctacattgtaataccaccccctcccacattttgacttattgctgtttcaatttacatatttttatattgcctaactcttaatcaattgttgagattatttaatagttcttccttttagctttcatacttaggatataaattgtttacttaccctaattatagtattatagaattatgcatttttctgttttttaatagtgaatttcatactttaggtttttttgttttgttttttgttttttgttttttacacattagcatccatttttttttcagattgaagaattccctgtagcattttttgtaggcgaagtgtcgtgttgtaaatttcctcagcttttgtttgtctgagaaagttttttatctctttttcctgtttaaaggatagttttcctgggtatagtattcttagctggctttttgtatttgtttccttcagcactgtgaatatagcatctcacttcttttggtctgctaagtttctcygagaaatccgctgaaagccatattagagatcagttgaatgtaatgtttcttttctcttgctgcttaaagtattctttctttgtttttgatttttactaatttcattataatatatctgggtagttttctctttgagttgaatttgtttaatatctttgagcttcctgcacttggatagtgttggttttctccagatttcagaaatttcagccgttactttttgaaatatgctttctagaccttttcctcttttacataatatctgttggaaatttctattatgtggaagttagtttgcttgatggtgtccccttattcttctttactctttttttaaattctttttccttttgcttctctgactgggtaatttcatttattcttttttcaagctcactaattctttcctctttttgatcaagtctgctattgaagctttctatggagtttttcagttcagttattatattgcttgcttctaaaatttgtttgctctcttaaaattgtttttatttttgtgaaatttcttattttgttcctggattgttttccaatttcaatctgtgttttattgtgattctttcaacttctttaagagaattattctgaattttctgcctgacattttggagatgttgcattcttctgtgtctattgttggagttttgttggtttctttgagtggtgtcatatttccctgagtttccacaatccttgtgtctttatgttgatgcttgtgtgtttgaagagtcagctacctcttccaattattgtgggggtttttttggtggtgttaggcctttattccttagtaatgaaacttcaatgttggcctgttatttcttcccattctgggagtcttatagtgtgcactggtacaaaaacactttgctggaactaacttgttgccctgccattgtttcccactctggggatgttttatagtgagcactggaagttaaaagctgtcctgaaattatattgctgccctacagttttttcccagtctggtaaagacaggtgagtaccagaactcagtcccaacttttagttgtttctgggccaggggaaagctccacctgggatttataaaaaattcagccacagatttgggcctttgcttgaatggtgcccccccttgcagcactatggcatcatccagtctcttcaacatggcacccccactgattgaagcacagagttgctgcctagatctgcatgccagtctttgagattaatgtcctgtgccttgtcttccaatcagccctctgggatacccaatggttcccatatgatgggactggagtgggcttcccatgaagattcccagactgatggggagattgaacatttctcctgctctcttgagttgtcaaccatgtgtttgcatttaggcagcagatggaattattgcaaatcatttactttataaccatttgtccccttatactatcttacaatctacttttcatataattgtgatgagttttctgctgttatggaaaattccatttatggctaaagcttttagtaaatgctatgaagcttgatgactctctctactgaatgggaataattatgcattagttcataaaatgttcttatgagtttgtttagtcactagaaaggctagaatactgatgcttaaatataaaaaatatatagtttaaagagctataatatctagcagttcttttgtttctaaagctccctggacattgagtaacaaataagttaataaagcaatagtttgttatttgattttatatcagaaagcctaaatagtattttaaaaataaagcttccatatattcaatcttattggaaaaagtatttgaaaagctcaacctcagcttcccctgttgttttatctagaatatttaagactttcttaacataaatcatcaaaaatatgtattttttctagttgagatttaactagattaattcagtgtgtggtatttttggctatcataataaaggtattgcatttccaaactgcagaatatttgcactgagtaaaatagatgccatttttttactaagtaattaaaacattgtcagaggatatgcttttaaaaattatcacaatagctgtaaagtcaattgtgttaatattggcaatctgtcccttctatttagaattttgtgccttagtctctgataattgcatcatttacaaatcccctctttacataaacatggcctttcacctaaccctctaaattaatcagccctcttttgattacaagtgacagaaactcaaatcaaaatagcataagcaatttaaataataacaacaataaatgatgaaagtttattagttatcttagctggaaggatttttaaagatgtagaaataaaatgagtaactgtagagtcagtgcctcagagactcacctcgtcatgagtaggactttttccctccatcactttcttacctcttcttagctacatctacatgaaggcattctccacttggaaaaaaagacggaggcacaacctcccatagaaaagagtttctttctcccattatcaatatatctgcttggattctgcttggctatttgcttggattaaatgtttactttttagatacattactgctaatagagaatgagaaaataagactggctatgcctggaggttaggaagtgaggaacaagagaggggcttcgcaagaatcatgtggaatgattgtgtgatgctttctgaaaggacatgagtctaggcagtcaaaaatacctggctaaacaccctaaggctatattccctctatatattccctattccctatattccctcccttacccaaactacccagcatctgctattcccgaactcttttcccctctcatttttttgcatttctattggaagattaacctgtgaataatcttttcaggttcctacctttaaaaatacaggacaaagacaactgcttcattatactcttatctcagtggagtaaagaaagtatctagagttctgtctctttttcaaagtagattattactcttaggaaaaataaaatgggcaaatcagagtttatattcaaaatatctcgtaacacctaaataaggcatggacgctgaacaatcagaattggtctttgtgtagacattgcatcctggaggcccgtattatatcaatcaggcttaaatttcctcattgctggatcattacatggtcctacttatctggctgatggggcaggttaacagttgagggctaggggagttcaaagtagtaattatttatccaccaggacagaaactatgtaatattttggtaataatacatgactgctgactaaccaaggcgggtcactatgtaggggtgcaggattaacagttacttaatagaattagccctgcagtgacaaactttaagagagttacgtgtttggaacattgatttaaaatgttcttttaagtagttgctttgtagcttgcttgttttgttttctttttcccaaatgtacttcaaatgggtcactgaatatcttcaaattgtatgtaaattttggaggggaagtggtatatgcagatttttttttttctggaaagaagaccaatcacttttgccaaattctcaaacaggcccatatttctctcacacacatgcgtgcgcatgcgcacacgcgcgcgcgcacgcacacacacacgttaagatgcgaagaatcactgtcataaaatgtcatatttctaatttctgtaaatggggagaattcctcaagcttatataaaagtgatgtaaataattcagttacaattataaaagaaatggtatcacagcaaatccctttggcaccccactgaaaatttctctctgatgtttaaaacaccatttctatgcttactcttacagctgtattaataatcagataaggggtttatttcttgtctattttgcttagcatattaccaaatctggttcatatgaactcatgggtaaaatctaaaaatgttcatgaattattcttcatgaatttttcacaaagcaataatgtatgaaaaagtgaacaatataacatcagccagagacgcctcagttcgcaatttacaatgaagaaaactggcatatactttagagggaatttctaataagccaaaaggttaaaagctaaatggggtcaagagctgtcaccttgacaaatggtaaagtctaacctttggctcccaccaggccagaccataaccgtagagttactaaagaaagcaactgtcaaggaacaagcccattattaagactgttacttaaagttctaagggaacttccttaaaccgttctatgtgtactttatttatcttgaaactttttgggaacagctgtataacaggaagtagtatttctgaggcccaggaagtgagtaagggctacacaaattggggctaatgactctattttgaaaaacaaacaaacaaacaaaaaaactaaaaaacttctcaggtgttttatgatgaaagtctacttctctatcttccatactgtttgccatcttccttgatgattacatctgatgaccaagctcaggctttcccatacaaatttattttgccaagtttgctttgaaagaatattagattttgtagagttttacattattaaaatcgtgagtggcttcttttgcttttcactgttgagtgtttttgctacagcctaacctatctttttcttattgcttgttttctttgtatttgctactcaatatagcttgtcaaatgtgtaattcatgtcatatacagtgctgtctaatataattcatgggtataaagtgagagagaaatgtaattctaaagttacttgaggtggaccactaaaaggtcctgagttcatttatttattcagcaaatatatattgtccaattgcaagctaggcatcaagtatattcaaggtggtaaataaaatgagcctgatcacttcttttagggcatttacagtgaagtggaggggacggacatgactcaatcaggtgaacacatcagccatataattacaaatgaacatgagagctgcaaaataaatagacgagagagctttgaaaaagagtaataaagggggctacctcagatggagggaggagaggttttatagcaaacttctctgagaagaaaatattttagctatgacctgagaaatcagaaggtgtcagtcaaggtgggagaaagaaaatttaagtagagcgagcagcatgcccaaaggtcacatgaggaactgaggaactgatgggaggccagcatggcaagaatgagtaggagagagaatggcacaaaatgaagaacaagagggcagtgtggcagcactactgctgatacccagatatgtgacattccacctcattccagacacaaagtagaattgcacttcctggctcccttgtgtttgggtggggccctgctactagatctagccagtgagttgtgagcacaaatgatgcctgtaactttctggtcaatttctgaaactaaagtatgtaatggatcagatcacctctgcactagagtagtcattcagtaagacaaggaggaaaaatggtgctgggccctatgtgaggagactatagtgtcctagtcagtttgggttgctgtaataaattactatagattaggtggcttaagcaacaaacatttatctcagttttggaggctgggaaatccaagattaaggtgctggcagattcaatgtctagtgagggcactcctcttggtttgcaggtgggtgtcttcttgttatatccttacatcgtggataacagagagaggaagcaggatttcttatttcttcttataagggtattaatcccatttattaggactctgccttcattacctaattacctcccaaaggccctacctcctaatgtcatcacactagaggttagaatttcaacatataaattttggggggcagaaaaacattcattccctaacatagagggtgaggaagatgagaggaaatgtccctttcagagactgaattgggaagtaaaccactttgtgtaatattgcagtaggtactgctatagtgaggaatggagagtggatggggagaactctcctttggtaagaagaaggaagaaaaagatgtaaagtagtgcctatgatcctgatgaatttactttactcaaactttcattaacctctacaaacaaaaaagaacctgagaagacttttgttagtcactttcctgtgcattgaggaattgtccagagggactagggaagcccatcagactaatggcagacctcttagcagaaactccacaagccagaagagattgaggaccaatactcaacattcttaaaagaattttcaagcagagaaaactcaggattaagaaactcactcaaaatccacacaatttcatggaaattgaacaacctgctcctgaatgactcctggttcaataatgaaattaaggcagaaatccagaagttctttgaaaccaatgagaacaaagagacaacataccagaatctctgggacacagttaaagcagtattaagagggaaatttatagcactaaatgcccacataagaaagctggaaatatctcaaatcgacaccctaatatcacaattaaaaagagctagagaggcaagagcaaactaatccaaaagctagccgaaaacaagaaataactaagatcagagaagaattgaaggagatagagacatgaaaaactctccaaaaaaatcaacaaatccaggagctgttttttttttttgaaaaaactaacaaaatagatagaccactagctagattaataaagaagaagagagagaagaatcaaatagatgcaataaaaaatgataaaagggatatatatcatcactaatcccacagaaatacaaactaccatcagagaatactataaacacttctatgcaaatacactagaaaatctagaagaaatggataaactcctgaacacatacaccctaccaagacaaaaccaggaagaagtcaaattcctgaataggccaatagcagtctctaaaatggaggcagtaattaatggcctaccaaccaaaaaaatcctaggaccagactgattcccagctgaattctaccagaaatacaaagaggaactggtaccattccttctgaagctattccaaacaattgaaaaggagggactcctccctaactcattttatgaagccagcatcatcctgataccaaaactggtaagagacacaacaaaaaaggaaaacttcaggccaatatccctgatgaacatccatgcgaaaatcctcataaaatactggcaaaccaaatccagcagtgtatcawaaaacttattcatcatgatcaagccagcttcatccctgagttgcaaggctggttcaacatatgaaaatcaatacatgtaatccatgacataaacacaaccaaagacaagaaccacatgattatctcaatagatgcagaaaaggctttaataaaattcaacatcccttcatgttaaaaactcacaataaactaggtattgatggaacatttctcaaaataatgagagttaattatgataaacccacagccaatgtcatattgaatgggcaaaacctggaagcattccatttgaaaactggtacaagacaaggatgccctctctcaccactcctattctacattgtattggaagttctgaccagggcaatcaggcaagagaaagaaagaaagggtgatcaaataggaagagagaaagtcaaattgtctctgtttgtagacaacatgattttatatttagcaaacaccatcatctcagccccaaaatttcttaactgataagcagtttcagcaaagtctcaagatacagaatcaatgtacaaaaatcacaagcattcttttacagcaataataggaaagcaaagcagaaagccaaatcatgaatgaactcccattcataatcactacaargagagtaaaatacctaggaatagagctaacaagggatgtgaaggacctcttcaaggagaactataagccactgctcaaggaaataagagaggacacaaacaaatggaaaaacatttcatcctcatggataggaagaattgatgtcatgaaaatgaccatactgcccaaagtaatttataaattcagagctatgcccatcaaactatcattgacattcttcacagaattagaaaagactattttaagtttcatatggattcaaataagactttggatggccaaaacaatcccaagcaaaaaaagcaaagctggaggcagcaggctacctgacttcaaactatactgcaaggctacagtaaccaaaacagcatggtgctggtactgaaacagacaaatagaccaatggagcagaacagagatctcagaaataacactacacatctacaaccatttgatctttgacaaacctgacaaaaacaagcagtggagaaaagatctcttattcagtaaatggtggtgggagaactggctagccaaatgcagaaaacagaaactggaccccttctttataccttatacaaaatttaactcaagatggattaaagacttaaatgtaaaacccaaaacaataaaaacagtagaagaaaacctaggcaatactattcaggacataggcctgggcaaagacttcatgacaaaaacaccaaaggcaattgcaacaaaagccaaaattgacaaataggatctaattaaactaaagagcttctgcacagcaaaagaagctgtcatcagagtgaacctacagaatgggagaaaatttttcctatctgcctatctgacaaaggtctaatgcccagaatttacaagtaacttaaacatatttataagaaaaaaacaactccatcaaaaagtaggcaaaggatatgaacagacacttctcaaaagaagatatttacatggccagcaaacatatgaaaaaagctcaatgtcatggatcatcagagaaatgcaaatcaaaaccactatgagataccatctcatgccaatcagaacgacaattattaaaaagtcaggaaatgacagatgctggcaaggttgtggagaaataggaatgcttttacattgttggtggaaatgtaaattagttcaaccattgtggaagacagtatggcaattcctcaaggatctagaaccagaaatactatttgacccagcaatcccattacttagtacatacccaagggaatataaataattctactacaaagatacatgcacttgtatgtttattgcagcactatttacaatagcaaagacatggaaccaaaccaaatgcccatcaatgatagactggttaaagaaaatgtagtacatatacaccatagaatactatgcagccattaaaaggaatgagaccatatcctttgcaggaacatggatgaagctggaagccatcatcctcagaaactaacactggaacagaaaactgaacaccacttattctcacccataagtgggggttgaacattgagaacacatggacacagagagggaacaacacacaccagggcctgttctggggaggggattgagtggagggaacttagaggatggtcaataggtgcagaaaaccaccatagcacacatatacctatgtaacaaacctgtatgttctgagcatatatcccgttttttttacaagaaataaaaataaagaaaaaaaagaaaatctcttgcaaccaatgaaaatgaaaacaaaatataccaaaacatatgggatacaactaaagcattgctaagagggaatttcatagtgataaatacctatattagaaaagaagagaggattttaatttagcagactcacctagagagcacaactctgattttgttgagaaagcctatctccacagaacctaaaacacacaaactttcaaggtaggggagattggaatccaagaagaatgcaaaaacattttgcaagctggtaagtctctggactggagaatatctggatcaggaaggaggcaagatggtcgactagatgcagccagaaggaacatctcccaccaaaggactgggacatcagaaagactggcacactcctagcagatcttcacagggaaggcactgagggcagatagagggaagacacagatgctgggctgcagagggaggaagctgggaaccctgagcaatgctagtgcacaccaggaccggttcctggtccccaagaactcctggggatggggtgaattgaacaggccaggagcgatccactctcgcatggatctctggaatcctggcatggggaaatcctttaaccaccatggacatttgaattggcagagagagctgcttagagaagtggaagggacagaagtccagccagtgcagagcccaaagggtttggagtgggagcacctatagtggagcatggccagggacacccatctccctaagctagacttgtttccataggagactgtagccctaggggaactgtcacctgaactctgcagggaggtcytgcccatgaaatggcagtccaccttgagtacccccttggtctgctggcctctccaggggccccagcctggctgcaggtgcttgcagtgcagtccccaggtagctcgtgggggcctgcattacagctcctgttctagtgggtcaggcctgactggcagagtgctccagcatagcagtccctgcagacaccagcatgcttgtggcctcccacaactgcagcgtcccccatgctacttggccttcacatactcaccaatggccacccccacattgctttgccaccatgtatttgcatgggcagactttgccttccttaccccaccaggatatgtgcatgcatgcatcctaccataccgctgctgcctgcatgagtgcaccttgttgccaacaccccactaaaccaccattgttgttagagcactgggtggcacagagcccaccagccctgcctttgccagcattctgctctggcaccaacacttccagcaatgtgaaactggacacagagaacagcagagtcacccctgccttgagcagccaccactgcctgcatgaaaacacacagagggtccacagtcttgtgtccatcagcacttcaaccccatgctaataccaccaccagcacgaatgcacacacagtcactggtgggggtccccgcccccaagccatgtcgccatgtggccaccactgctgctgtgaatgcccacacagaggccagaaccccagcacctgctagcacactgccacatccaacaagcatgcaccctgctgtgttgccactgtcactgctgctggcacatgcaaatgagaacagattctgctgcctctgccctatgaagctctttgtctggcactacccatcagagtgttgtgaccaacagtccagaagtaactcagcccctccagtgcagcaggttcctaaccttgaggagccagaaaacaaagttgggaactgataccagtcccccagggttagagcacacagtccacgagtcctgagttgagtcttggtcccctaaaatcttccagaaattgagccagtcaactgaacccaccttataccaccatgaaacacccaaggtcatgaaatagaacaaaagaaaaaaatccaaaggacagtaatttcaaagattggaggaacaggccaggcgtggtggctcacacctgtaatcccagcactttgggaggccgaggtgggtggatcacgaggtcaagatatcaagaccaccctggccaacatggtgaaaccccatctctactaaaaatacagaaaactagccgggcatggcagtgggcgcctgtagtcccagctactcgggaggctgaggcaggagaatggcgtgaacacgggagacggagcttgcagtgagccgagactgcaccactgcactccagactgggcaacagagcgagactccatctcaaaaaaaaaaaattcgaaaaagattggaggaacatcagaccacaaagatgagaaaaaaccagtgtaggaactctaagaactcaaaaagcctgagtgtcttctttcctccaaatgatcatactagttctccagtaagagttcttaactgggctgaggtggctgatatgacagaaataaaattcaaaatatatatagaaatgaagatcatcaagattcagaagaatgttgaaaccaatctgaggaagctaggaatcacaataaaatagtacagaagctgacaaacaaaacactcagtatagaaaagagtgtaaccaacctgatagagctgaaaaaacacagtacaaaaatttcataatttaattgtaagtattaacagcagaatagaccaacctgaggaaagaatcttagagcttgaagactggctttctgaaataaaatagtcagacaagaataaagaaaaaataataaaaaggaacaaacaaaacctccaagaaataagatattatgtaaagagaccaaatctatgactcattggcatccctgaaagagatggagagaatggaagaaacttggaaaacatatttcagaatatcatccatgagaacttccccaacctagctagtgaggccagcatttaaattcagaaatgcagagaacccccataagagacttcacaagaagatcatccccaagacagacaatcatcagattctccaaggttgaaatgatagaaaaaatgttaaaggtagctatagagaaaggacaggccacctacaaagggaagtccttctgacacagcagacctctcagcggaaactctaccagccagagagattgggggactatattaaacattcttcaaaaaaagatattccaactgagaatttgatatctgcccaaactaagtgtcataagcaaagaagaaataagatccttttcagacaaacaaatgctgagggaattccttatcatagacctgccttacaagaacccctgaaagaagcactaaatatgaaaaggaaagaccgttatcagacactgcaaatacacagtgtctctataagtacacagaccagtgactctataaagcaaccacacaaacaagtctgcatagtaaccacctaacaacatgatgacaggatcaaacccatacaaattaataccaaccttcaaggtaaatgtcctaaatgctcccaattaaaaggcacagagtggcaagctaaataaagaagaatgacccaatggtatgctgtcttcaagagacccatctcatatgcggtgacacccataggctcaaaataaagagatgcagaaaaatctaccaaaaaatgcaaaacagaaaaaaacaggggttgcaatcctaatttcagacaaaacagactttaaactaacgaagctcaaaaaagatgaagaaggatattatgtaatggtaaaggttttaattcaacaagaaaagctgactatcctaaataggtacatacccaacagaggagcacccagatttataaagcaagtttttagagatcttcaaagagaattggacttccacacagtaatagtgggagacttcaacaccccactgacagtattagatcattgaggcagaaaattcacaaagatattcaggacttgaactcaacactggaccaaatggacctaatagacatctacatatctctccacccaaaaacaacagaatatgtattcttctcatcaccaaatggcacacactctagagttgatcacataatcagactttagacaatcctaagcaaaagaaacaaagtcatattgaaccacagtgcaataaaattagaaatcaagactaagaaaattgctcagaaccatacagttacatggaaactaaacaacccacttttgaatgccttttaggtaaataatgaaattaaagcagaaatcaagaagttcccagaaactaatgagaacaaagataaaatataccagaatctctgggacacagctaaggcaatgttaaccaggaaatttatagcactaaatgctcacatcaaaaagttagaaagatttaaaataaacaacctaacatcacaactaaatgaactagagaagcaagagtaaaccaaccccaaaactatcagaagacagtaaataaccagaatcagagctgaattgaaggaaattgagacatgaaaagccattcaaaagatcaatgtatccaggggctgtgtttttgaaaaattaataagacagatggactgctagctagactaataaagaagaagagagaagatccaaataaacacaattttaaaaataagatagtaattaccactgaccccagaaaaatacaaataaccatcagagactactatgatggtttgtgtactatgcacacaaactagaaaatctagaaaaattgataaatccctggacatatacactctctcagactgaaccaggaagaaattgaatccctaagcagaccaataacgaactgtgaaattggatcagtaaatttatcagtaaatagcctaccaaacaaaagaagtccaggaccattcatatcacagccaaattctagtagatatacaaagaagagctggaatcattcttattgaaactattccaaaaaattaaggaggagggactcctccccagcacattctatgaggccagcatcatcctgatttaaaaaaaaaaaaaacacctggcaaacacatagaaaataaaacttcaggctagcattcttgatgaacatgcatacaataatcttcaacaaaatattagcaaaatgaatccaggagcacatcgaaaaactaatccaccacaataaattggctttacccatgggaggcaaggttggttcaacatacacaaatcaataaatgtgattcatcacataaacaggaccaatgcaaaacccacatgattattgtaatagatgcacaaaggcttttgataaaattcatcacctcttcatgttaaaaaccctcaaccacctaggtactgaaggaacgtacctcagaaaaataagagttatctatgacaaatccacagccaacatcatactgaatgggcaaaagcttgaagcattccacttgaaaaccagcacaagacaaagacgccctttctcaccactcctattcaacatagtattttaagtcctggccagagctatcaggcaagagaaagaaataaacagcaaggcaataccaaacagccaaggcaatactaagcaaggagaacaaaaaagaacaaatctggaggcatcacactacctgatttcaaactattctacagggatacggtatccaaaacagcatgattctggtataaaaacagaaacatgaccagtgaaacagaatagagagccctgaaataaggctgcacacctacaaccatctgatcttagacaaagcaaaggggaaaggactccctattcaataaatgatgctgagaaaactggctagcgatatgcaggagattgaaactggacccattcagtacactatacataaaaattaactcaagatgggttagagacttaaacgtaaaactcaaagctataaaagctctggaagacaacctaagcaataccattccagacataggaactggcaaagattttatgatgtagatacctaaagcaattgcaacaaaagcaaaaaaatgataaatgggatctaattaaatacagagcttcctcacagcaaaagaaactaccaacagagaaaatagacaacctacagaatgggagaaaatatttgcaaactatgcatctgacaaagttcttatatccagcatctataaggaacttaaatttataagaattaaacaaccccattaaaaagtgggcaaaggacgtgaacagacactttgcaaaaaaagtacgtgcagctaacaagcatatgaaaaaaactcagtatcactgatcattagagcaatgcaagtcaaaaccacgagatgccatctcacatcagtcagaatggctattattaaaaagtcagaaaataacagatactggtgagcttgtggagaaaaggaaatatttatacactgttggtgggaatgtaaattagttaaactattgtagaaagtagtgtggcaattcctcaaagagctaaaaacagaactacctgtcaacccagcagtcccattactggatgtatacgcaagggaatagaaactgtttcatcataaagacacatgctcacatatgttcactgcagtactattcacaacagcaaagacatggaatcaatctaaatgcctatcaatggtaaactgagtaaataaattgtggcacatatactccatggcatactatgcagccataaaaaggaatgagatcgtgtcctttgcgggaacatggatagagctggaggctgttatctttagcaaactaatgcaggaacagaaaatgaaatactgcattttctaacttataagtgggagctaaatgatgagaagacatggacacaaagatggaaactaggcttagcaactgggtgacaaaataatctgtacaacaaactcccatgacacaagcttacttatataacaaacttgcacatgtatctctgaacctaaaataaatgtctttttaatatctggatccaaattgttttactggccaatggaaaaagattttttgcccagatggctaaatcttttgaataatatttgtgaaaaagacttttaagatttttgaataatatttgtgaaaaagacttttaataatattagtgaaaaagacttccttacagaaggcaaattaagtcttaatttaatttggcagcttttaatgtggcaatctttgattctttattcttttagatggctgtgtgcaccaattaaagaatgcatcccatttgctaaagaaattaaaatttaaaagaaaaaaatcttaaacaatttaatactacatctcaaggaagtagaacaataacaacagactaaggccaaattaggcagaaagagggaattaacaaagatttgagcagaaatacatgaaacggaaaattcaaaaataatagaaaaaaataagacaactaggaattggttttactggttttttataaatataaactaaattggtaaaaccttaagtaaactaactagcaaaaaaagagcgatgcctcaaataaaaaaatcagaaatgaaagaagagaaatcacaaatgatgccacaaaataagaaagaatcaaaagagataactatgaacaattatgtgccaacaaactggataagctagaagaaatgaataaattcctagaaacatacaatcaaccgagactggattctgaggaagcagaaagtccgaacagacctataactagtatagatattgaaatagttattacaaagctcccaggaaggaaaagcccagtaccaggtggcttcactggtgaaattctaacaaacgtttaaagaaaaatttataccatttcttctaaaacttttcaaaaaaattgaaggggagagggaacatgtccaaattcattactctgatactaaagtcagacaaaagcaccacaagaaaacaaaactataggccaatatccctgaagaatgaacatacaaattcctcaactaaaccccagcaaactgaatccaagagcacattaaggggattatacaccatgaccaaatgggatttgtacttgggatgttagaatggttcagtgtgtaaaaattaacgtgaaattccacattaacaaaataaagcataaaaacatgtgatcatctcaagatacagaaaaagggtttgacaaaatttaacatcttttaattaaaaactcaaactagtaatagattatgtcaaatacaaatacaaatattatatacctcaacataataaaagccatatattaaatgcccatcactaacgtcatactcaatggtgaaaaaccgaatgaaggcttttcctctaagattagaaacaagacaaggatgcccactttcactgcttctattcagcaggatacttgaagccctatctagagcaattgggtaagaaaaaaagtaaaaaggcatttaaattgggaaggaagaaataaaattttccctgtttgcaggtaacatgatcctatatatagagaaaactctgaagattcaattaagaaactgttagaactaacaaatgaatttagtgaaattacagagtacaaaatcaacataccagaatcagttgcatttctatacactaacaacaaactatctgaaaggaaattaagaaaacaatgcccatctaaactagtgccaaaaagaataaaataatttagtaatacacctaaacctaactaacaaggtgaaagatttgtgtattaaaaactacaaaacattgatgaaagatactaagcaaatcaaaagacattgaatgttcatgaactagaagacttaacattgttaaaatatccatactaccaaaagaaatctacagattcaatgcaatccctatccaaatctcaatgtcattttttacagaaagtgaaaaaaagctctaaaatttatatggagccatgagtcaagaaataaccaaatcaatcttgaaaaaaagaataaagctagagacatcacatttcctgatctctagatatgttacaaaaccacagagatcaaaacaatatgatactggcattaaaacagacatatagaccaatggaacataagagaatccagaaataaatctatgcatacttggttgttttattctattcgggctactataataaaataccataaactgggtagcttataacaacagaaatatatttctcacagttccagaagtttggaattccaaaattgaggcacaggtactgatggactgcttcctcatagttagtgccttctcactgtgtctcacatggtggaaaggtgaagcattcctctcagatgtcttttattcatgaagtctccacttttatgacctaatcatctctgtaagtccccgtctcctaatgccattcaacatatagatttagggagacaaagattcaacatatggattttgggtgacaccaacattcagtctatagcaacagtcaactgacgtttgataaaggtgtcaagaatacacatagagattggagagtctcttcaacaaatggtacttggaaaactggatatccatattaaggaatgaaactggatgcttgtcttacatcatatgcaaaaatcaacttgaagtggcttaaagattaaacatagaccaagactataaaactactagaagaaaaccttcatgacattggtcttggcaatggtttcatggatatgacatcaaaagcacaggcaacaaaaacaaaagtaaacaaataagaatacatcaaactaaaaagcttgtgggtgaattgtttgagctcaggagttcgaggccagcctgggcaacatagtgaaaccttgtctctacaaaaaattaaagaaaaaattagctggatatggtaggctcacacctgtagtaccagccacttgggaggctgaggtaggaggattgcttgcacctgggaggtgccagaggttgcagtgagctgaaattgggccactgtactccagcctgagtgacagatccagaccctattgcaaataatagtaataataataattaataaaataatgatatgaatcaacagagtgaaaaggacacttacagaatggggggaatatttgcaaaccgtatatctgataaagggttagtatccaaaatatctaaaataaaccccttcaggttattagttaaaataaaagagagagaaaaataaataaataaataaataacctgatttaaacatgggctatggacttggatagacatttcttcaaagaagacatacaaatggccaacagatattttaagaaatactcagtgtcactaatcatccaggaaatgtgaattaaaactataatgaaatatcacttaacacctactatagtagaatggctactgttaaaaaaaacagaaaatagcaagtgttgacgaggatgtacagaaattggaacccttgcacactgttggtggaaatgcaatatggtgcagcttttgtgggaaacaaatgaagttcctctaaacatttaaaaatgcaattacatgatccagcaatcccactttggggtgtttattcaaaagaattgaaatcaggatctcaaagatgtattagcactcctatattcattgtaggattattcacaatagttaagatttagaaacaacttaagtgtctattgacagatgaatagatgagaaaatatggtatataaatagtggactattattcagccttaaaaaagcaggaactattgccgtatgtgacaacaacatggatgaaacttaaagacattgtgctaagtgaaatacatgagtcatagaaagacacatattgcatgattccacttatatgagttatctaaaatagtcaaattcatagaatcaaagagttggattgtggttaccagtgggtggaggtagagagaaggtagagagaaatggggagttactaaacaatgggcgtaaagtttcagtcaagaaagatgaataagttctagggatctgttatacaacattgtacctatagtcaacaataatgtattgtacacatatgcatttgttaagaaagtagttttgtgtttaatgtttttagcacaattttttaaaataaaaagacagtggtattctaattttcctttcttttcttaaactcaattagaatttctaaatttggggcatgttcttacatttataggtaacagttcatttattattttgagacatagagcaatttataaggaaattaaagggaaactccctttaattcatcttccttcctgatattcaagaacatagactgagctttcctctatctctttcagttctagtttatatttgcaaaggtgtgtctgggccagtccaatctttcttcctactgttctcatctaccatatcaatttacattacagatcacatgccgaactttaggggagaggacaaattactgggattaacaatgaaagatatagaactgctcaggatattttctaggtttaggagacttgaggaaaatgaataagtgaaatgtagacatatatgaatgaatatatcaaacatcagaggagaaaatttagctgtgtccagagaggacagagatgctatctttctattgcttgtttttgaactttctttcgtattttattattgtattgttaataatcattgaagtagtgtgagaaatttcagagaagtagaagtagagcagtttctctgaaaaacttatagatggtgacagatgaccacataattgtgtgacagtaaaatgctgtattgagcttcctgctgtattatagaaagaacatatgaatagataaaagcacaacagttttccttttcactatgtctcaggagaaaacaatgcacatcggcatatatggaaacaaatgagattagttaaaagaaggaatttaaattatgtagactaagccagggtaatgcttacgaatgagatgactcatctaataaaagcatcaaagagaaaaactgttgtttcagttcagattttcttggtcgttttcctgagatgatgatgatgatgatgatgatgatgatgatgatgatgataatttgctttaggaaggagctgcacactacaaaatgcaacagagttgataatgataagattagttgaattaagtaattctagaccccaaattgattatttcatttcactttctaggtcaatagtgtaccttgttgcaatgaactgagttggttgtaaaaagtctactatcttatcaaaagattgttcaaaaacatctccatgtactaaatactatcaagcaaaaatatattgtgtatagggaaatacagtatttaaaaaaattggtagaatctacaatgaactcaaacaaatttacaagaaaaaaacaaacaaccccatcaaaaagtgggcgaaggatatgaacagacacttctcaaaagaagacatttatgcagccaaaaaacacatgaaaaaatgctcatcatcactggccgtcagagaaatgcaaatcaaaaccacaatgagataccatctcacaccagttagaatggcgatcattaaaaagtcaggaaacaacaggtgctggagaggatgtggagaaataggaacacttttacactgttggtgggactataaactagttcaaccattgtggaagtcagtgtggtgattcctcagggatctagaactagaaataccatttgaccctgccatcccattactgggtatatacccaaaggattataaatcatgctgctataaagacacacgcacacgtatgtttatagctgcactattcacaatagcaaagacttggaaccaatgtaaatgtccaacaacgatagactggattaagaaaatgtggcacatatacaccatggaatactacgcagccataaaacatgatgagttcatgtcctttgtagggacatggatgaaacgaaaccatcattctgagcaagctatcgcaaggacaaaaaaccaaacacgcatattctcactcataggtgggaattgaacaatgagaacacatggacacaggaaggggaacatcacactctgggtactgttgtggggtcgggggagcggggagggatagcattaggagatatacctaatgctaaatgatgagttaatgggtacagcataccagcatggcacatgtatacatatgtaactaacctgcacattgtacacatgtaccctaaaacttagagtataataataataatgataataaattggtaactagtttaaggtcatgtaacctactcacacaaataatcacaataagatgtaatatagaatgtgcatgtaaaacataaattttatacataaaataaataatagatcatagccctgatgcatgcgtgcacaaacacacacacacacacacacacacgacacacacacttgcactatatttgcaatagcctagctactaaggaatctgattaaacatagattctatcttgcatatccgatttcttaatagcagaattaagagcttcttggaagaaaaggcttatactcaaaatctgcttttctgaatccttttgagttgagcacaaaaggaaaccaaaaagacccaagaatagcaatgcaatgtgtgtattgaaggtttgttaggaattattcactattgtatttcttttctgtcctacattacagcataggctttgcctagaggcaaaagaattaagaattacttgcagttcctactcttttgcagtcaaggcagtaatagggtgatggataaggtgtatagaacagcagttctcaccaaatgcccttgaaaaatcaagcaaatagatggcttcacatttcattatctaaccccgatatggcctgacatttatactgggagcagagatgccaatataactgaagggttttgaaatggccctttgaggaaaggtgatgaggtatccattgatttaatctaagaggagatggagaaataatacaagagggacttgatttcacatgcaacttgtttaggagaccgcatctcaacagtttttgaatggcatatttctagctgttcatgtggctttatgctgatagtgtcagtcaaatgaacaagcttgaagtttttaatcagaaaatattacattttataagtggaagggtgcaaaataagaagattgcaaagtagcgctgcctgcacctatcattaatgctgtgtggatttttttctaattgaaaacagcacaacgagagctctgagtatgagatgtagttatacaaaaaggcataagatgctagacaccttcaaatactgggtgttctccttactagccatatgaccttaagcaatgtatttaacctattctttgttctcattttcctcattcataaaatatgcacaataaaacttaccttatagttttgtttcaaatataaaatgaataaatattgttaaattatttcgagcattctttggtacacagtaaaccctccgtaagtattaacttttatggataaaaacttttaaaaaatggaaatagatttattatttttatctgattatgaaaattatatgtgattattatttaaaagattttaaagaaagatgcaaagagaaaaaattacttaaaatcaatttgtcctcagataactatagtgaacatttaggtatcatagttccaggaagacttttgtgttcaaaagatgcataatgtatacaattgtgtcatgggcacatctcctcgggccaatctatggctgacccctactccatcctacccctaaagtaaacatgcattttgacctgtatcactgtcatctgtcaaaatccatgctcctcaaaggcagtatcttctgtaaaccctcaatctttttattactatctagattctcaggcttaattgttccaaattatgccagccatcacctccatgcaaatctcacttacctacctctttatccatcaaaaataatctattaaaatcagttatacttacttatttagcacttaaatattttagactttgtgctaagtgcctcacatatagcatttttactcttccagatagctttcaagggagctttcataacaaccattttagcattgtttcgatctcattctcaatctccatctctttcaaactataaactaaatttctcccttggcaaggttggcctacacccaggaacaagcaaggaaagccaccctctgaggctagaagcaagatggagtcagccatgctagccttctctcattgttataatctttgcaaagctggtttcatattttactaatctttctctgttaaatggacaaacatccttcttgatgctacttcacacaccttttccaacctctctgtacttgacacaattagacaaagcatttgctcaataaatatttataaagttaagaaagaatcactttatacctaagagtggatcctaatgtttacataaatatattcctgtattgaggttcttcctttctccccaattaccaaattctttctttctttttctttctctttttctttctttctttccttctttctttctttctttctttctttctttctttctttctttctttctttcttctttctttctttctttctttcttctttaagttttgggatacatatacagaacatgcaggtttcttacacagtatatgtgtgtcacgatgatttgctgcacctatcaacccatcacctgggttttaagccctgcatgcattagctatttgtcttgatgctctccctcccctcgtgcccccatgacccaacaggccctggtgtgtgttgttcccctccctgtgtccatgtgttcccattgttcaactcccacttatgagtaagatggatttctgtttgcttttctgatcctgtgttagtttgctgtgaatgatggcttccagcttcatccatgtccctgcaaaggacatgaactcattcctatttgtggctgtatagtattctatggtgtatatgtaccacattttctttatccagtctatcattgatgggcatttgggttggttctatgtctttgctattgtaaataatgctgcaataaacatacatatgcacgtgtctttataatagaattatttatattcctctaggtatttacccagtaatgggattgctgggtcaaatggtatttctggttctagatccttgaggagttgccacactgtcttccacaatggttgaactaatttacattcccaccaacaatgaaaaagtgttcctctttctccacagcctctctagcatctgttgtttcatgacttctttttaataagcgccattctgactggtgtgagatggtatctcattgtggttttgatttgcatttctttaatgatcagtgatgttgtgcttttttttcatatgtttgttgcccacatgaatgtcttcttttgagaagtgtctgttcatgtttttgcccactttttaatgggttttcttgtgtttttcttgtaaatatggttaagttccttgtaaattatggatggtagccctttgtcagatgggtagattgcaaaaatgttctcccattctgtagattgcctgttcactctgatgacagtttcttttgctgtgcagaagctctttaattagatcccatttgtcaattttagcttttgttgtgattgcttttggtgattccatcataaaatctttgcccatgcctatgtcgtgaatgggattgcctaggttttcttccagggtttttatggttttgggttttacatttaagtctttaatccatcttgagttgatttttgtataaggtgtaaggaaggggtccactttcagtcttctgcatatagctagccagttttcccagcatcatttattaaacagggaatcctttccccattgcttgtttttgtcaagtttgttgaagatcagatggtcttatatctgaggtctctattctgttccactggtatatgtgtctgttttgatacctgtaccatgttttggttactgtagccttgcagtatagtttgaagtcaggtagtgtgatgcctccagctttattctttttgcttagaattgttttggctatacgggctcttttatggctccatatgaattttagagtagtttttttctaattctgtgaagaaagtcaatggtagtttgatgagaatagcacttaatctataaactactttgggctgtatggccattttcatgatattgattcttcctatccatgagcatgggatgtttttccatttgtttgtgtcctctcttatttccttgagcagtggtttgtagttctccttgaagaggtccttcatgtcccttgttagctgtattcctaggtgttttattctctttgtaacaattgtgaatgggagttcattcatgatttggctctctgcttgtctattgttggtgtaaagaaatgcttgtgattttcacacactgattttgtatcctgagactttgctgaagttgcttatcagcttaaggagatttggggctgagacaatggggttttctaaatataggatcaagttgtctgcaaacagagacaatttgactttctcttttcctatttgaatacgctttatttctttctcttgcctgattgccctggccagaacatccaatactatgttgaataggagtggtgagagagggcatccttgtcttgggccagttttcaaagggaatgcttctcgcttttggccattcagtatgatattggctgtgggtttgtcagaagtagctcttattactttgggaaatgttccatcaatatctagtttattgagagttttatcatgaaaggatgttgaattttgtcgaaggccttttctgcatctatcgagataccaattaccaaattctaagattacatggtgttctgcagtgaatagatctatgcaaacctacccccaaagttcaaggaagctgagaggctgaagaggctgacatatccagcttctcaggaaaaatgaaaaaacaaaaaacatttaatagccaggtcccaggtggctgcaagaggagatggtggttcactgcagtgttagccccagacctaggaattatttgctgtagtgaaggaacatgtaggacagttgaaatcaactcctcagggaaaggcaagcatgctatgtaaatctgcctaagggaaggatttatggttgaggctgttttgaacaaagggtagaatttatggtaacagtaggtaaagtataaatcttagaggcattcctggaactggggtaaatcagatgtcagtatggtggactgacaatgaagatggagttgctttagtctccacacatgggaacagatagaaaaaggtgtctttataaccaaaatgttggcttttacaaagctctgctgtaattctaaatagatggaagaggataaatcaaataactgaattaacttaaaaattccctttttagagtaacttcttcaaatttaaaagaattttatcaaagtagtgtgggcatatctactgggggatggagaaacatagagcaagagagagagaactttgtgatggaaatcaagattttcttaaatctctcatagaataattattagagtatttatgaattttcttctcttctccaaattatcttcacttggggttattttatctttatttgtgtatcttggactgtcttttttcaaagcaagctttctttagatgcctgatgagctatgattataattttattcaagtttaaggaatgaaaagctgattgggctctgacttgcactttgctttggagtcatggggctatgaattaacagttttcctgggggggatcagaacatgccagatgatggaagtcttttgtctggagctattattttgatttagaaaggttttattttagtgaagttataaagaatcctcaaatatttctctaagctggagaggcctgtctcctgggtgtcctctttcctgcagggttggatagtggctatttctacccatagatacttgtaattgtcagttccccatgtcactcctgtaccctttcctgtcttcattgcatgtggtgttttggaattcttagcctttctggaaaggcaatttctctctctcagtctgtcatatttatatcccttctagataatctaacctgtggttgactgtatttcatgtgctatctcttctttatctgctttgtcatctatacatctgttgacatattttgtattctcatgactctctttcagttccttactaccattagggttttgtacttttctcccctttagtgacatctaagatgggaaagattgtaaatacatatgaccagattcatcagggaaatatatgctattctaggtagttcacacaagatattatgtaatacaggtaattaaaaggttacatggtcattctgagaacttggagttaggtgattagagaagttgctactagaatgcaagaaactgggaagtggaaagatcacagacagctgccaacagtgttctctggtgccaacagcttaaaacttagttctcaggaaaatctccagtgtgttttgggttttgccaattacattatatcatgtatccaccattactgtatcatacagaatggagaaataacatgtttattgaatacagacacacacacacacacacacacacacacacacacacatatgacaatgccaaaaaagatagatagaacttctaatttcattgatgtttctagtttcctgaagaagctagaaagaatggtatggatatcatttttctgaatatatacataaaggttgaaattaatataactattcagaattttaaaacaatgaataactgtgatatgggatttattttatttttaaaaaaatgaggaagattttcatgttatgatgctttcatacggtatctctcgtatgagtgacaatactgccttttaattttttctcaaaatgttatagggcaacaagagattggcagtatgagctgtctttttattgtattttaatggtaaacttgtacatgattatggggatattctaacttttatgattttttaaacaactctcagttccatcccataaaagagctttatgtagaaatacttttagcagcttttaagtttatttcatcttctcttccccaggagacaaggtaaaagtagagattacattttctggagatattactttcatttatatctttataaatatggatagacaattttataataacagtgctaacactgaaaaggaaaagagtaagattttgtaatttataaataatccttatggggatgttattatttaactctgaagatgttgtttcacttttcattattttggtttcagtcactgcttgcagaatagtaatctcttagcatatgaagtcagcagatcaaatgcaagaaacaaaacaaaacaaaaaactcagaacaaaatcaagaaggctcaaagtttagcacactatttatttcactgtttttaatcatactcaggaagggttttagtgaagaaacaggagtgagattaatcaaaatagctcaaaatgctcaaaacttaagttatatattcaggaggctttaaattcccaccattttaaaaagtgttctttaaacctcaatttcgggtaccttgctgttccttgggtttgactgaggatcagtattttcttgccatttatcacacttaaacatagagcatccagaatcaataaactacaaagcagaagatttagagaatctatctttccagaataatagtcatactttcccaaacatgttctatacaattttaggggactatagacctttggtatatatatcagatgttaagctttttgttccattaacattactgtagtcagttgtaatgctatgttgttaatctagagacaggaatatataacttctattttcttcaaatgaaaaatggctttggtcataagtacctatacccaaatcttatttcaatatactctacattaacagcatgttacagataggaatccagtattatatttacataaattagttatttatctcgatatttacagagtgctaggcattgtgcaagtcaaataatacatattcactgtcctcaaaaactcaacactagctaatgggagaccagcatcaaaataaaaaaataagagcaatacagttttctatgtgcaagacagacacagttctacagggctggggacagaaggcactgaagaggaatggagaaactgaatgaggaaaaactttggagaggaggtgtggctggagctgagtattgaaataggagaaatatttgttcagatattactctttttattttttcatgactgaattccaggcatacgtaccttcaaataccttattgcagatgacctagaaggctgcatgtaaagataaatacatcctaacatttgtatattgttgcttctcaaatttcacaactgtgattacttgctgtgttggttactgatctttattttcatttacttagcatcttcattgataatcctgattgatgtagttttactttcatcatctaaatatctctagtttctaatttattctgtgtagagactttagtttcatcaaatataagtgggcatgaaattatatacctgagccaatagaagaactcaagacttttatttgccttaatgtaggatttaaaaaccaattcaaaaacaattgtttatatatgtgggaaaattcctttaagtttctgttgataggtattggaataggtttcctagtaagatattaaatgtgtcatccaaataaatttttaggttacataaacactgatcttgaataaaatagctatagttctacctggaggtagagagtcataataatatcaaattagagctcatgtttgtgtgtgtatgtgtttgcatacttgtgcacgtgctggcttttatgtacaaaatggtgatcatcaaaggtagttgtcatcaaaaagtcatagattataaaagctaaaaaggacactgtattttaaagatacggaaacctaggcccagaaaaattagacaggttgcttaagactgagagcagagcccagaacttgggcctcttgacttccctttgcaaatatatcattgtgctttgaaattatagatatacggaatcatagaacaggaagaaactgtatgatcatccagagctcattgacagcccctccctcccctccacatatatgctaataaaccctctgctgtctctcttccacttaaatttgcggggaaatctagttagcataaaaacactgatccctgtggctggctatgctttttttttgacagattgtcctgctactgctgcttcccgtcttccttcatcattcacattatgacagacatttgagcagagtctcagtgaaaacttgtttgggggttggtgcctctgattctcagtgcagcctgccagcctcattgggaaaaggtgtttaatataggcagcgattttctgtattatgaactgaaatagaaaatgctgcgatgggttcattcaagggagacccaatatcttacttacaatgaagaaatcaggcaattttggggagtagaagtggaagtgtgactcatacatatattggtattttcttttatgagattttgatatggcacttaatgttttatgctgagaggagatgaagatttctcattttcctacaatttcactgagaaaatcatacagcaaggacacagaacttcatgcaactgccttcttttattagtacctatatcttgtctttctttcctttcttcccttccttgcttctcctttcccttttggtttctttgttaagccttttcttccttccctttatccctccttataattgattttgcttctttgtgttactactttctttccatggttcctccaacctgtagtatgaaagagagtggatatggtagtggttaagagcataggctctaaagtcagactgcctggctttgaatcctctctaccacttactgactgagtgaccttggattgagtcactgaacttcacttttcaattttttatgtcttattggataagtttcaatcagagttgaggatgaagtgagatatatgaaagtgcttagtacaaagcacatgtgttgctatcttatagtatgcagtcacgactttcatatatatattacatttatggttattccaatatatacattttgtgtagaaggcttagtctttcaattacaataagctattggtatagtttagccatctaatgctaatggaaaggagaatgggctcaattgttctaaacaaattttataacttacttatcttgggctttgaagaaaggtatgaggaaattaaccacagagatgtgtgcacacctaagagacattgaccccacttactttctttccttgctccttggctaagactcctatgtaagtgccattgttgctagaagtttgaagcttttgtaaggttttagtttttgtgattttatatcttttttcagatatttaattaaatttaatatatatttgcaatctataacaccatataaataatcatgataaatcaaaagatatattgtctggtccctggtctctcggagctgccaaggctcctagctgctgggaaagctgatgtatatgcaacttggaacataaggcagtgtttattgatgccattgatctttgtaatgggctacatgattgaaccttttttttatttcttctccttagtctttgataatgacttcacatctgtagttatctctttatatttgttgagttgctttttgctgcctgcagtattctagacattttataattagagataaagcttggaatttcctatgcaacatgttttgtattcagcctgctttcttcttcccacagttttggtctggttttgtttattagtttgttttctgcaggtagaaatacctaggaaagacaacatcatttgataaagtataaaatatgcttatttaggagagaatactttaaaaggcttatgaactcttgatgactatcctttagtttataattaacttatttttttttattatactttaatttctgggatacatgtgtagaatgtgcaggtttgctacataggtataaacataccttggtggtttgccacaccaatcaacccatcatctacattaggtatttctcctaatgctatccctcccctagtctccacccaccgacaggccctggtgtgtgatgttcccctccctgtgtccatgtgttctcattgttcaaatcccacttatgagtgagaacatgcggtgtttggttttctgttcctgtgttagcttgctgagaatgatggtttccagcttcatccatgtccctgcaaaggacatgaactcatcctttttatggctgcatagtattccatggtatgtatgccacattttcttaatccagtctatcgttgatgggcgtttgggttggttccaagtctttgcactgtaaacagttctgcaataaacatacatgtgcatgtgtctttacagtagaatgatttatatttctttgggtatatatccggtaatgggattgctgggtcaaatggtatatctggttctagatccttgaggaattgccacactatcttccacaatggttgaactaatttacactcccaccaacagtgtaaaagcattcctttttctccacgtcctctccagcatctgttgtttccagacattttaattatcaccattctaactggcatgagatggtatctcattgtggttttgatttgcatttgtctaatgaccagtggtaatgagctttgtttatatgtttgttggccgcataaaagtcttcttttgagaagtgtctgttcatatccttcgcccactttttgatgggtttctttgtttttttcttataaatttgtgtaagttccttgtagattctagatgttagacctttgtcagatggatagatggcaaaaatgttccctattctgtagtttgcctgttcactctgatgatagtttcttcagctgtgaagaagctctttgattagattccatttgtcaattttggcttctgtggccattgcttttggtgttttagtcatgaagtctttggccaggcctatgtccataatagtattgcctaggttttcttctagggtttttatggttttaggtcttatgtttaagtctttaatccatcttgagttaatttttgtataagttgtaaggaaggggtccagtttcagtttcctgcatatggttagccagtttccccaacaccatttattaaatagggaatcctttccccattgcttgtttttgtcaggtttgtcaaagatcagatgtttttagatgtgtggcattatttctgaggtctacattctgttccatttgtctatatatctgttttggtaccagtaccatgctgttttggttactgtagccttgcagtatagtttgaagtcaggtagcatgatgcctccagctttgttctttttgcttaggattgtcttggcaatgtgggctcttttttggttctgtatgaaatttaaagtagcttttttctaattctgtgaagaaagtcagtggtagcttgatggggatagcattgaatctataaattactttgggtagtatgggcattttcatgatactgattctttttatcagtgagcatggaatgtttttccatttgtttttgtcctctcttatttccttgagcagtggtttgtagttctccttgaagaggtccttcacatcctttgtaagttgtattcctaggtattttattctctttgtagcaattgtaaatgggagtttgctcatgatttggctctctgtttgtctattactgatgtataggaatgtttgtgattttcacacattgattttgtatcctgagactttgctgaagttgcttatcagcttaaggagatttgggcctgagacaatggggttttctaaatatatgatcatgtcatctgcaaacagagacaatttgacttcctctctttctatctgaatatcctttatttcgttctcttgcctgattgccctggccagaacttccaatactgtgttgaataggagtggtgagagaggacatccttgtcttgtgcctgttttcaaagagaatgcgtccagcttttgcccatttggtatgatattggctgtgggtttgtcataaatagctcttactattttgagatatgtttcatcaatacctagtgtattgagagtttttagcatgaaggggtgttgaattttatcaaaggccttttctgcatctattgagataatcatgaggtttttgtcattggttctgtttatgtgatgggttatgtttaatgatttgcatatgttgaaccagccttgtatcccagggatgaagctgacctgatcatggtgcgtaagctttttgatgtgctgctggattctgtttgccagtattttattgaagatttttgcatagatattcatcagggatatcggcctgaaattttttcgttgtgtctctgccaggctttggcttcaggatgatactggcttcataaaatgagttagggaggactccctctttttctattgattggagtagtttcagaaggaatggtaccagctcctctttgtacctctggtagaattcagttgtgaatctgtctggtcctgggccttttatgattggtaagctattaattactgcctcaattcagaactttgtattggtctatttagggattcaatttcttcctgatttagtcttgaaagggtgtatgtgtccaggaatttatccatttcttctagattttctagtttatttgcatagagctgttcatagtatactctgatagtaatttgtatttctgcgggatcagtggtgatatcccctttatcattttttattgtgtctatttgattcttctctcttttcttctttattagtctggctagtggtctatctattttgttaatcttttttaaaaaaaaacagctcctggattcattgattttttgaagggtttttcatgtctctatctccttcaattctgctctggtcttagttgtttcttgtcttctgttagcttttgaatttgtttgctcttgcttctttagttcttttaattgtgacgttagggtgtcgattttagatcattcctgctttctcctgtgggcatttggtcctataaatttccctgtaaacagtactttagctgtgtcctagagattctggtacattgtatctttgttctcactggtttcaaagaacttatttatttctaccttaatttcattatttacccagtagtcattcaggagcaggttattcagtttccatgtagttgtgtggttttgagtgagtttcttaatcctgagttctaatttgctctgtggtctgagagactgtttgttatgatttctgttcttttgcatttgctgaggagtgttttacttccaattatgtggtcaattttagaatcagtgtgacaaggtgctaagaagaatgtatattctgttgattttgggtggagagtcctgtagatgcctattaagtctgcttggtccagagctgagatcaagtcctgaatatccttgttaattttctgtctcagtgatgtgtctaatattgacagtggggtgttaaagtctcccaatattattgtgtgggagtctaaaagtctctttgtagttctctacaaacttgctttatgaatctgagtactcctgtattgggtacaaatatatttaggatagttagctcttcttgttgcgttgatccctttaccattatgtaatgcccttctttgtctttttttgatctttgttggtttaaagtctgttttatcagaagttaggatggcaacctctgcttttttatttgctttccatttgcttggtaaatattcctccacccctttgttttgagcctatgtgtgttgttgcacgtgagattggtctcctgaatacagcacaacaatggatcttgcctctttatccaatttgccagtctgtgtcttttaattggggcatttatcccatttacatttaaagttaatattgttatgtgtgaatttgatcctgtcattatgatgctagctggttattttgcccattagttgatgcagtttcttcatagtgttgatggtctttacagtttggtatgtttttgcagtggctgttactggttgttcctttccaaatttagtgctttcttcaggagctcttgtaaggcaggcctggtggtgacaaaatctctcaggattgggttgtctgtaaaggattttatttctccttcacgtttgaagcttagtttggctggatatgaaattctgggttgaaaattcttttcctgggggaggagccaagatggccgaataggaacagctctggtctacaactcccagtgagagcgtcacagaagacgggtgatttctgcatttccatctgaggtactgggttcatctcactagggagtgccagacagtgggcgcaggtcagtgggtgcatgcaccatgcgcgagccgaagcagggtgaggcattgcctcactcgggaagcacaaggggtcagggagttccctttcctagtcaaagaaaggggtgacagacagcaccgggaaaattgggtcactcccacctgaatactgcgcttttctgacggccttaaaaaacggcaccaggagattatatcctgcacctggcttggagggtcctacgccaacagagtctcgctgattgctagcacagcagtctgagatcaaactgcaaggtggcagcgaggctgggggaggggcgcccaccattgcccaggcttgcttacgtaaacaaagcagccaggaagctcaaactgggtggagcccaccacagctcaaggaggcctgcctgcctctgtaggctccacctctgggggcagggcacagacaaacaaaaagacagcagtgacctctgcagacttaaatgtccctgtctgacagctttgaagagagcagtggttctcccagcatgcagctggaggtctgagaacgggcagactgcctcctcagatgggtccctgacccctgacccctgagcagcctaactgggaggcacctcccagcaggggcagactgacacctcacacggctgggtactccaacagacctgcagctgagggtcctgtctgttagaaggaaaactaacaaacagaaaggacatccacaccaaaaacccatctgtacatcaccatcatcaaagaccaatagtagataaaaccacaaaaatggggaaaaaacagagcagaaaaactggaaactctaaaaagcagagtgcctctcctcgtccaaaggaacgcagttcctcaccagcaacggaacagagctggatggagaatgactttgatgagctgagagaagaaggcttcagacaatcaaattacgctgaggtactggaggacattcaaaccaaaggtaaagaagttgaaaactttgaaaaaaattgagaagaatgtataactagaataaccaatacagagaagtgcttaaaggagctgatggagctgaaaaccaaggctcgagaactacatgaagaatgcagaagcctcaggagctgatgcaatcaactggaagaaaaggtatcagcgatggaagatgaaatgaatgaaatgaagtgagaagggaagtttagagaaaaaagaataaaaagaaaagggcaaaccctccaagaaatatgggactatgtgaaaagaccaaatctatgtctgattggtgtacctgaaagtgacggggagaatgggaccaagttggaaaacactctgcaggatattatccaggagaacttccccaatgtagcaaggcaggccaaaattcagattcaggaaatacagagaatgccaaaaagatactcctcgagaagagcaactccaagacacataattgtcagattcaccaaagttgaaatgaaggaaaaaatgttaagggcagccagagagaaaggtcgggttaccctcaaagggaagcccatcagactaacagcggatctctcagcagaaactctacaagccagaagagagtgggggccaatattcaacattcttaaagaaaagaattttcaacccagaatttcatatccagccaaactaagcttcataagtgaaggagaaataaaatcctttacagacaagcaaatgctgagagattttgtcaccaccaggcatgccctaaaagagctcctgaaggaagcactaaacatggagaggaacaaatggtaccagccactgcaaaatcatgccaaaatgtaaagaccatcgagactaggaagaaactgcatcgattaacgagcaaaatagccagctaacatcgtaatgacaggaccaaattcacacataacaatattaactttaaatgtaaatggactaaatgctccaattaaaagacacagactggcaaattggatacagagtcaagacccatcagtgtgctgtaatcaggaaaaccatctcacgtgcagagacacacataggctcaaaataaaaggatggaggaagatctaccaagcaaatggaaaacaaaaaaaggcaggggttgcaatcctagtctctgataaaacagactttaaaccaacaaagatcaaaagagacaaagaaggccattacataatggtaaagggatcaattcaacaagaagagctaactatcctaaatatatatgcacccaatacaggagcacccagatgcataaagcaagtcctgagagacctacaaagagacttagactcccacacattaataatgggagactttaacaccccactgtcaacattagacagagcaacgagacacaaagtcaacaaggataccctggaattgaactcagctctgcaccaagcagacctaatagacatctacagaactctccaccccaaatcaacagaatatacatttttttcagcaccacaccacacctattccaaaattgaccacatacttggaagtaaagctctcctcagcaaatgtaaaacagaaattataacaaactatctctcagaccacagtgcaatcaaactagaactcaggattaagaatctcattcaaaaccgctcaactacatggaaactgaacaacctgctcctgaatgactactgggtacataacgaaatgaaggcagaaataaagatgttctttgaaaccaatgagaacaaagacacagcataccagaatctctgggacgcattcaaagcagtgtgtagagggaaatttatagcactaaatgcccacaagagaaagcaggaaagatctaaaatggacaccctaacatcacaattaaaagaactagaaaagcaagagcaaacacattcaaaagctagcagaaggcaagaaataactaaaatcagagcagaactgaaggaaatagtgacacaaaaaacccttcaaaaaattaatgaatccaggagctggttttttgaaaggatcaacaaaattgataaaccgctagcaagactaataaagaaaaaaagagagaagaatcaaatagacgcaataaaaaatgataaaggggatatcaccaccaatccgacagaaatacaaactaccatcagagaatactacaaacacctctacgcaaataaactagaaaatctagaagaaatggataaattcctggacacacacactctcccaagactaaaccaggaagaagttgaatctctgaatagaccaataacaggctctgaaattgaggcaataattaatagcttaccaaccaaaaagagtccaggaccagatggattcacagccgaattctaccagaggtacaaggaggagctggtaccattccttctgaaactattccaatcaatagaaaaagagggaatcctctctaactcatttgatgaggccagcatcatcctgataccaaagccaggcagagacacaaccaaaaaagagaattttagaccaatatccttgatgaacattgatgcaaaaatcctcaataaaatactggcaaaccaaatccagcagcacatcaaaaagcttatccaccatgatcaagtgggcctcatccctgggatgcaaggctggttcaatatacgcaaatcaataaatgtaatccagcatataaacagaaccaaagacaaaaaccacatgattatctcaatagatgcagaaaaggcctttgacaaaattcaacaatgcttcatgctaaaaactctcaataaattaggtattgatgggatgtatttcaaaataataagagctatctatgacaaacccacagccaatatcatactgaatgggcaaaaactggaagcattccctttgaaaactggcacaagacagggatgccttctctcacccctcctattcaacatagtgttggaagttctgaccagagcaattaggcaggagaaggaaataaagggtattcaattaggaaaagaggaagtcaaattgtccctgtttgcagacgacatgattgtatatctagaaaaccccaatgtctcagcccaaaatctccttaagctgataagcaacttcagcaaattctcaggatacaaaatcaatgtacaaaaatcacaagcgttcttatacaccaacaacagacaaacagagagccaaatcatgagtgaactaccattcacaattgcttcaaagagaataaaatacctaggaatccaacttaacaagggatgtgaaggacctcttcaaggagaactacaaaccactgctcaaggaaataaaagaggatacaaacaaatggaagaatattccatgctcatgggtaggaagaatcaatatcgtgaaaatggccatactgcccaaggtaatttaaagattcagtgccatccccatcaagctaccaatgactttcttcacagaattggaaaaaaaactactttaaagctcatatggaaccataaaagagcccgcatcaccaagtcaatcctaagccaaaagaacaaagctggaggcatcacactacttgacttcaaactatactacaaggctacagtaatgaaaacagcatggtactggtaccaaaacagacatatagatcaatggaacagaacagagccctcagaaataatgctgcatatctacaactatctgatctttgtcaaacctgagaaaaacaagcaatggggagaggattccctatttaataaatggtgctgggaaaactggctagccatatgtagaaagctgaaactggatcccttccttacaccttatacaaaaatcaattcaagatggattaaagacttaaatgttagacctaaaaccataaaaaccctaggagaaaacctaggcattaccattcaggacataggcatgggcaaggacttcatgtctaaaacaccaaaagccatggcaaccaaagccaaaattgacaaataggatctaattaaactaaagagcttctgcacagcaaaagaaactaccatcagagtgaacaggcaacctacaaaatgggagaaaattttcacaacctactcatctgacaaagggctaatatccagaatctacaatgaactcaaacaaatttacaagaaaaaaacaaacaaccccatcaaaaagtgggtggacatgaacagacacttctcaaaagatgacatttatgcagccaaaaaacacatgaaaaaatgctcaccatcactggccatcagagaaatgcaaatcaaaaccacaatgagataccatctcacaccagttagaatggtgatcattaaaaagtcaggaaacaacaggtgctggagaggatgtggataaataggaacactttcacactgttggtgggactgtaaactagttcaaccattgtggaagtcagtgtggcgattcctcagggatctagaactagaaataccatttgacccagccatgccattactgggtatatacccaaaggactataaatcatgctgctataaagacacatgcacacgtatgtttattgtggcattattcacaatagcaaagacttggaaccaacccaaatgtccatcaatgatagactggattaagaaaatgtggcacatatacaccatgcaatactatgcggccataaaacatgatgagttcatgtcctttgtagggacatggatgaaattggaaatcatcattctcagtaaactatcgcaagaacaaaaaaccaaacaccgcatattctcactcataggtgggaattgaacaatgagaacacatggacacaggaaggggaatatcacactctggggactattgtggggtgggggtaggggggagggatagcaatgggagatatagctaatgctagatgacgagttagtgggtgcagcacaccagcatggcacatgtatacatatgtaactaacctgcgcattgtgcacatgtaccctaaaacttaaagtataatataaaaaaaaaggaaaaactagagtataaatgaagtgtcaaagatgttaagaaacaggatcttttaaaaaattgtttttaattattatgggtacataataagtgtatatatctatgggatacatgtgaaattttgatacatacaatatataataatcttattggggcaattggggtgtccatcacctcaggcatttatcatgtcttgtattagaaacagtccaattctcctcttttagctatttgaaaatatacaataaattattgttgagtataaaaaaaaagtccacacctagtcatattatgttcaaatcacagaaaactaaagacaaccagaaaacatgaaagaagctacagaagagaagaaatttacctaaggagggacaaggataagaattacatcagaaatctcattggcaaccatgcaagaaagaagaaggtagcgtgaaatatttaaagtgtttaaaggataaaactagaattctggatacagtgaaactatccttcaaaagcaaagaagaaatgctttctcagacaaaggctgaatctgtcaccagtagacctgccttgaaataaatgttgaaagaaatttttcggtcagaaatgaaatgacataggtcaaaaactgaaatctacgtaaagaaaagaagagctttcaagaaggaacaaatgagcataaaataaactctttaatattccttaaccttaaaaaaaaaaaaagaaaattccttcctttaagagtggccccctctcttttctgtcttgtagggtttctgcagagagatccactgttagtctgatgtgcttccctttgtgagtaacctgagctttctctctggctgtccttaacattttttcctccatttcgaccttggtgaatctgatgattatgtgtcttggggttgctcttctcgaggagtatctttgtggtgttctctgtatttcctgaatttgaatgttggcctgtcttgctgggttggggatattctactggataatatcctgaagggtgttttccaacttggttccattctcccatcactttgaggtacaccaatcaaacgtaagtttgtttttttcacatagtcccatatttcttggaggctttgttcattccctttcattcttttttctctaatcttgtcttcaccctttctttcattaaattgatcttcaatctctgatatcctttcttctgcttgatcaatttggctattgatacttgtgtatgcttcaggaagttcttgtgctgggtttttcagctccatcaggtcgtttatattcttctctaaactgattattctagttagcaattcctctcaccttttttcagtgttcttagcttctctgcattgggttagaacatgcttctttagctcggagccatttgttgttacccacattttgaagtctacttctgtcaatttgtcaaattcattctccatccagttttgttcccttgctggtgaggagttgtgatcctttggagaagaggcattctgatttttgtaattttaagactttttgcactggttcctccccatcttcatggatttatctacctttggtctttgatgttggtgacccttggatggggtttctgactggacatcctttttgttgacgttgatgctactcctttctgtttgttagttttccttctaacagtcaggcctctctgctgcaggtctgctggagtttgctggatgtccactccagaccctctttgcctgggtatcaccagcagaggctgtagaacagcaaagattgctgcctgttctttcctctggaaggtttttcccagaggggcacccaccagatgccagctggatctctcctgtatgaggtgtctgtcgacccctgctgggaagtatctcccagtcaggaggcacgggggtgagggacccatttgaggaagcattgtgtcccttagcagagctcaagcactgcgctgggagatccactgctctcttcagagccagcaggcaggaatgtttgtctgctgaagcagcgcctacaggcacctcttcccccaggtgctctgtcccagggagatgggaattttatctataagcccctgactggggctgctgcctttctttcagaagtgccctgcccagagaggaggaatctaggaaggcagtctggctacagtggctttgtggagctgagcccagtttgaacttcctggtggctttgtttacactgtgaggagaaaaccgcctactgaagcctcagtaatagcagacacccctcccctcaccaagctcaagtgtcccaggtccacttcagactgctgtgctggcaacaagaaatttaaactagtggatcttagcttgctgggctccacaggggtgggatccgctgagctagaccacttggctccttggtttcagccccctttccacagttgtgaatggttctgtctcactggccttccaggtgccactgtggtatgaaaaaaaaaaaaaatcctgcagctagctcggtgtctgcccaaacagccacccagttgtgtgcttaaaacccaggatcctggtggtgtaggaacccaagggaatctcctggtctgcaggttgcaaagactgtgggaaatgtgtagtatctgggccggaatgcaccattcctcacagcacagtccctcatggcttcccttggctagaggagggagttccccaaccccttgaacttcccaggtgagttgatgcccaaccctgcttcagctcacacgccgtggtctgtacccactgtctaaccagtcccaatgagatgagctgggtatctccgttagaaatgcagaaatcacctgccttctgcattggtctcgctgggagctgcagaccggagctgttcctattcggccatcttgccagccagccactgtaattcacttattttcaaatgttaccattagaactgtataccatattacaagtttcaaacactatcctgccagggcacaaaagagttcctagttgccttaaagaattagctattgtttcatctgtgtgtggcttcgtctcagagggtgattgaaacatgacaagaagtgatttttttttctcaagagaaatggaggctttggacattagtgtcatagcaatgtcatgtagaacatacatagagaattctatgaagaaatcagccaagccgtgactatcgaccaaaattttcaactttcaacaatgagatgaatatactatctatatatctaataatccaaagcttcatttatgaacatattgcttctcaaaataaaaatttggagcagtttgtgatttaatgatggaaattttttataagaactataatggcagttaaattataaaactgaagttactaatatgaatcagtgagcctttcatgagcttttattttaaccagctaaaatactaaaatacttttattttaatcagctaaagcattcaacttatagtgaggagagttttgttttcaacacagttacgaaagaattcgggctcacttaattgtaaataaaaatcttaaagaagaaaccattgtttaaaatgttacctcattgagtttttcagtaaatggaacaagaattaacatttagggtaataatagtttatgtctgtttttaattatcggacagaatacttagggaatggacagaggcagtaaagaaaaatagttcattatattataatgtatcattagttttgaatgtgcatacacctaatattaactgtatgtatagtacacaattggtcattttatttttaaaatattacctcatatcaataatcctaatttaaatggttaagaacatggaaataatttccatgaagtatgcatttctgagtaatggttgtatataaccaaaatgaaagctaattaattcatttggtgaaagttatagtgagataaagcacagactgtagacatatacaacattaattaggacaatgttattctacatctacaggtggaatttccacccaacctggaggctcatcagcatttaccttttattcaaaggggaaattggtgagagagtagaggcagataatcacagcatcccactctactagaaaagcaagccacagctcccatcctgctggtgatgtgacagcactggtctttctacacagcagcacactagtaccaaaaaagaggctttgctttttctgtgtgatgagctgtaaaccttcatattagaaaaactcagaaaagaattttgcttagacgctaatcaaatacaaaaattgtggctgatggaaactacacatagataaattagtccaatattcttctacttgtgaaatttaaataacttcatcttaagaaataaaggtaattgggaaaattgaaaaggaagtgtttccagttttgatagagtgaatggggcattcaaaatatatttctaaatgaatgataaaaataaaatacttgcaatattatcagaatttatttccacaataaatatgttcaggaatgttaagtggggaagcctgggcagccattgtgctgtaactggctctgtttattttttgctcttcaaaagagaaagaaaggaaccttagcacaatagcagaatttcctgatggtggctattacaattttaccactgaggaaaggacatctatgggtctttgaaaagctaggaaacatcttgaatatcagaaattgtaaatgaatactacttggtgtagattaaactaaagacatgggattatatggtctcaaagccacagatgtagttgggtcctaagaaccttgtcatatatatctatattttttattttttttattttttttcttttattattattatagtttaagttttagggtacatgtgcacaatgtgcaggttagttacatgtgtatacatgtgccatgctggtgtgctgcacccattaacttgtcatttagcattaggtatatctcctaaagctatccctcccccctcccaccaccccacaacagtccccagtgtgtgatgttccccttcctgtgtccatgtcatctcattgttcaattcccacctatgagtgagaatatgtggtgtttggttttttgttcttgtgatagtttactgagaatgatgatttccaatttcatccatgtccctacaaaggacatgaactcatttttttatggctgcatagtattgcatggtgtatatgtgccacattttcttaatccagtctatcattcttggacatttgggttggttccaagtctttgctattgtgaatagtgccacaataaaacatacatgtgcatgtgtctttatagcagcatgatttatagtccctttgggtatatacccagtaatggcatggctgggtcaaatggtatttctagttctagatccctgaggaatcgccacactgacttccacaatggttgaactagtttacagtcccaccaacagtgtaaaagtgttcctatttctccacatcctctccagcacctgttgtttcctgactttttaatgatcaccattctaactggtgtgagatggtatctcattgtggttttgatttgcatttctctgatggccagtgatggtgagcattttttcatgtgttttttggctgcataaatgtcttcttttgagaagtgtctgttcatgtccttcactcactttttgatggggttgtttgtttttttcttgtaaatttgtttaagttcattgtagattctggatattagccctttgtcagatgagtaggttgcgacaattttctcccattttgtaggttgcctgttcactctgatggtagtttcttttgctgtgtatatggaactaaaaaagagcctgcataagccaaaagaacaaagctggaggcatcacactacctgacttcaaactatactacaaggctacagtaaccaaaacagcatggtactggtaccaaaacagagatatagatcaatggaacagaacagagccctcagaaataacgccgcatatctacaactatctgatctttgacgaacctgagaaaaagaagcaatggggaaaggattccctatttaataaatggtgctgggaaaactggctagccatatgtagaaagctgaaactggatcccttccttacaccttatacaaaaatcaattcaagatggattacagacttaaacattagacctaaaaccgtaaaaaccctagaagaaaacctagacattaccattcaggacataggcatgggcaaggacttcatgtctaaaacaccaaaagcaatggcaaccaaagccaaaattgacaaataggatctaattaaactaaagagcttctgcacagcaaaagaaactaccatcagagtgaacaggcaacctacaaaatgggagaaaattttcgcgacctactcatctatattttttaatggatttaaccagcaagaaagaccatggagccacctaaatttttccaaaatctgcaaaatgaaggtgatataaatatgtcacttagacaatatttcatttttgatataaaattttattttttatcagtttgataatatgcataggactaaaaaatgcagttgtcttaaaatattttagggttgcttaggaaatcactttaaaaataaaaagtgtcagaataaaagttgtctgcttatgttccatatttcagaactacctttgatttctttagctaaacaatattgcacataaataggttaggaattatagactttcagatgtgctacctgtctcccttcaaaacactcatttaggtaatgtattaattatttttagaatcacctgtcttctctgcttcagcaaaaaccccaccagggcagagatcactctccctcttgtttgctttgaatttttatgacttagcacagtgattggcacataaacattattaaaaccaatgaatgaggaaagcaacgaataagtaaacaaatgggcccagactaaaaagtaagttatatgtattagtgagagtcaataataaattaatgaaataatcttttatttgaaactgaagcaaattaagggaaatttatgaaccttaaatctttttgtaaagatctagtaccaataagataaaaaaaatgctcatccttttttccattgaaatgttatgttcaaatgagctttgtttctatactttatacatcaattaagctgaattcataggtgctaagcattttaacatattgtattgcatgtaatattccctaatgccccaaacttcaagattatataatggcttactctctccctgtccctacccaccagatagtgttatccacatacattctcatctagttttgttctgtgatgaaaaaccatatgcgtatcctattcctatgtgaattaacctggcatgcaggtaactgaagtgcatgtgatctggtctctgctgacatatcacaatgggcccccctccttgcatggaggtagcgttttttataagacaaaatgtttttaaatagaacacatttcagatttcagattttatatgtattttgtgtttttcctccctctacccctttccaaaattatgaatgaaattctaggaccatttatagacaaagcacagtttagtccgagtaaaccaatggaccctgaagtgtccaagtcagagtttatttgcagaatttaattcattcccacagagataggcaacccaggcctgtgaggacacgagggtaactaggcaacaaagtgccgtagtcaggcttgtgtttgctttttggtaagaggacaacattgacttcagtgtcagggcataaaggagactcaggacttattaatttttttccccataattctgtgaactttgtgaattccctaatattcttttaacaagagttcggagacatgagtttatgtgccttcttggatatattcacgggagtttgcagagaaagttgaataaattattaggttaatggcctgtgtaaattcaccaacaccttttcactatctcatcaatcatcctgtttgagttattgtgattcactctgctgatgagctcacacccttttttcctgatacaggaattattgtacaccaggggactggattttaaacaaaacgtattccttagaataacttgaacaatggattggtgggtccttacactattatgtgctgtgtagctgtacaagtgtgtctgcatgagctttaggacattatttgagatattttaagctatgtgtacctcatgaacttgtagctgattttccttagttcttttaaaatattttctcagaaaaccaacagtaaaatctatcaggttcacatgaatacactcatttgtgtcatatcaacccaaaatgaatatgatcttccaggtaatgatgaaggatgataactataatatttccagccaaactttattttgaaacatcactcagtgtttcacatgtttagtggctgttaaattctatatgtctaagcaaactgtgaagagcataattaacttatttggttgttgtgtatcttttaaaatcacagtttgaatctgctgggaatgttatagtggcactagtagcaaaggaatggcaaggatgttaagactttctcatgctaagaccccagcttggtattgagtttttaggaggggcccgcatgacatctctaattgctttggcaatccaattattgagacaagtaagtgagcccatcgggtgcctcccaaggaattaacttggtcatttgatataatgttgcactctccctatttgggaggaggggtggccaccctcacctctgccattgaagattaacccactacaaattttcaaaaatataatatctaatttattacacagactatcatatgggtttcataatccttaagtatctctaaattttattattattttagatttttaaataagactccacctaacttgatggaaggaaaagggggtctagaagcatacagagtttggctcttggttctcagagtgactcgccatgtgaacatgggcaagttatttaacttctttgagccttttgaattttaatctgtaaaacagagacaaaaatgccttcctcagagggtgaaaataaggattaagtacaataatgaatgcaaaatacctggcagaggacctaccttgatgtgctattctcaacattgatatttaatcagtatacacaagtatgcccttttttttttttttgagacggagtctcgctctgttgcccaggctggtgtgcagtggcgccatttcaactcactgccacctccgcctcctgggttcaagcaattctcctgcctcagcctcccgagtagctgggactacaggcatacgtcaccatgcccggctaatttttgtatttttaatagagactgggtttcgccatgttggccaggctggtctcgaactcctgacttcaggtgatcctcccgcctcagcctcccaaagtgctgggattacaggtgtgagccaccgcaccctgctgcatgcacattttgcctggatgatcttccaggctaccatgtggatctctctcatacagcagagggagagttgtacagcaatgagggcttcagaactgtgtctgacccatgctgattgctcagtgcccctgagcacaagtttttaaacattttgaatctcacccataatatttctcatcttgcagagacagagagcattgtggctatataatgcaggtaaagtacctagtgtaacgaataacatgcggaaatgataaatatcataagttgtattactgcctgtggtagtctgaataatggtcctcaaaagatatccaagtcttaatttccataacctgtgaatatgtaaccttatatgtcaaaaggaactttgcagatgtggttaatttaaggatcttgagatggggggattttccttgatgatccaggcaggccctaaatgtaattataaaggggccttttaagagagaggcaggaaggtcaaaggcagaagaaggcaatgtgacagcagaagtagaaattggtgtgaagccgcaagccaaggcatgcaatgctgaaagcctctagaagctggaagaagaaagggatgaatcccccattggcatctccagaagcaattaatcccactgacatcctgattttagcttagctctgtaagactaattcaggacttctgacttatttgtggtgttttaaaccactcagtttgtgttaatttgttgtaagggcaatgggaaatgaatgcacttcccatccataaccctgtctctagctatgttgaagtctttaccatcccccaaatctgacttttacttgcatgcttcttgcctttacatatctgcttttccttcctgcttcttcctatctcccacatcattgcctttctcacaacttctctactcagcaaattcctgcttatcctctgagagggaggacaagatcatctcagatatagtttgctagctaagaaaagagtcctgagactgctttgaaatcttgtggtcctttatccatagctcatgtaaataactctgagctagcagtgtatattatttttatttcatcctggaactatgtcttagcaatatttttattggagaaaaaactgagagcaaactctctgtttcccacatgcctattgccaaatttctctgggtgctttactttcactgcactgattctagaaattgtattgacaactgtgttctaagatgaccctttgattcatccagatggtgtgaaaatgttcctcttcaaaaaccccacactgcttttcaacatcctaatgggtagaatctctaaatccttagggtgtcaacaaaagcaaagggcatatttacacttcagttgggtgaaattaattagcatggaagttaatatttacaattaatggagattacctgactttaatagtgagattgtgtagctactttgtatcactcactctttttttgttgttgttttagaaattgtggcaaaaaatggataaaataaaattcacccttttaaaacattttttgaattcctggagtgtaaaagtggtaggataaccaaaacatcctctttcttgttgaaccatcaacaattgtcttttgaaaagaggtttgaatatcttttctttgaaaatcctcgtgcaaaacttcacaccatgatcatttatgaggtagttatcagacactggagatgaattactggggatttttgtgttctggttctcagtatacaaccaaaggtagaatattgacattgaaaataaatgtcactcgtttctcaaggaaaatttgtagtttaccgaacaacagcacaaatgaaagctgagatactttaccagtgatattgtaggtctcagtgagtaaaaactcaattaaaagtatattggggtggcgggggcactgtgtatagatagacctggacatgatctctaatcacaaatgctacttttagaagggccagattcttgatacagagacattttatttggtggcaataaccatggcttgtccacagaatgatgccgtattattctcctgacctaacttcaaagaaataaagagtttgcaagaagaactgcagttcttcaaagtacgcaatatggatttccaagatgaatgtagtttctctctctgaggaattctgaacagtggtaaagtttcacaagtttatgcatatcttttgctctacatccttccctaaaagaacttgtggcaacaaacaaagggaaagaaataacattttttaataactatgtggaaagctctatagtaagtgcttcacatgttacctcatttaattcttacaactaccttatctagtaaattatctcccatttgacactttaaggaagcagctaagagatgtttcataactttcctagaaaaggtaggatttgaatgcaggtttgtattattccaaagctcacaatgtgctttacgcaacatcaaagtaacatattgcgggaatgagtacctttcccatttaaaacaaatgagtcctggaaactcttaccctgtttagttatggaatggctcagaaaatagaaagtgttgagatcatcaaagagagaagttaacaaagagcattgtaatccagaaataagaacgcaatagagaagtagaagttgtgtggctaattttaccaaactaaatagcctgaattattcagtgtgactatacacattgatcaaattaaatgagcataccatagtctaaaggggacgagatttatattctatccaagaagtcattaattatgtttgtactatcttcatcatggttatcatttttcttagacatagcctaatctataagattttactgtatttccctgaattactaaattcttctatttttgaagttttactaagattttattgtatttccctgaattactaaattcttctgtttttgaagttttactaaatacttcagaagctttactaattaaaaaggtaatttataatgtttatcactaaccagttgataataaagcgcttccttatagcttcttaagataatagctagaaaacaaagctgattttaattattcttgtaatttgcttcaacttcactgacagtctgttgtatattttctgcatatgtaattacatcaggttttgactattttctctgaggtaaataattccaattactttaacctgtcattgtttctctttctctctcatttctttctctctccctccctctctctttctcttattataagacatattatttgtttaattttaatagctattccagcagttaaatattcttatcataaatttcttgcaatttttaaatgtggaattccagtacaaaactttggtttagcagtaggtaaaaagatagattgaaatttatgtaaacatattattcttcatcaggcagggctagctgactgacatctgctttggtttggattcaaatacagatttaaagggaggctatacatggaaattatccccaggctcctccccgctgctgttcccaatttctgcagcagcctgcatgcttgtatttaggattcaccaatttttttggcccttgtgtgtgcttggcttttgttttgatttactctacaatggcaggatgttctgggaactgatgtgatgaagtaaaggaaagcaaatagcctttgtcatgtttaatttcccttaaaatctatttgccagtgaaaggcctttaaaatttttcattataattaaatgtttgttaaagcaaaaagcctcttcttgtatctatagactaaatcagggtttctttaatcataggtggttaatcctcactactcctttacccaaatacatttcataagatgctaaagatgtcaaggaaaattcatatctctgactaacagaaaatattctttcacaaataaaatgtgaagtgttcttagttgtccactattcttttaggtcctacattattctatatctattttcaacaaaagcataaattatgggaacattgaattaaaataacatgaaggtccataccatgtccctggatcagaagtctccaaatcataaaaattgcagtggtccatcaactgatctgtagatttgatataatttaagtcaaaatactgacttgtttattttgggggaacttgccaatctgggtctaaaacttacacggaaaagcaaaaattaataggccactgtagattttccttacgaggtagtgtgagtttttaaattcatttatttatttatttttgaacatttaatttaggtttggggtatatgtgcaattttgttataaaggtaaactcgtgtcacaaaagcattgaattttatgccatgttatctatggttgaaatataatagggagcgagtttattttaaaatcatgtgtctttttaagatttgatttatgctgacttcagaatgtgacgagttttagaaatctgagtgtaggaatgaatgttctattggaagtatctagtttattgctttcagctctactgatcatggatattaaccaactcttgtttttgttttttgtttttttgttttttgagacggagtctcgctctgtcgcccaggccggactgcggactgcagtggcgcaatctcggctcactgcaagctccgcttcccgggttcacgccattctcctgcctcagcctcccgagtagctgggactacaggtgcccgccactgcgcccggctaattttttgtatttttagtagagacggggtttcaccttgttagccaggatggtctcgatctcctgacctcatgatccacccgcctcggcctcccaaagtgctgggattacaggcgtgagccaccgcgcccggccttaaccaactctttaagcagtgtttggctcatggacattggggttaagtctgtgtaattagggctttaggatattgggattaattaaaccagttgctgctttaatccagcattttaggcatcaatggttgatgatgggaatgattctgtaacttgcatttatggtctaagagctcactggtgtatatacctgggttaattggggattttaggtagccagaattggaaaatagaatgcacagtatgagaaattcccccgtctctgaggatgggggatgctggggcccccgtaccatcaagtagcacatccacaactcactccatttaccacatcatcaccatcaccaccaccaacaagcacttgacctccatcctaacttcaacaatcaccttcagtctgcctaactgatgctatggaagaacaacagagactcagaagggtaagagggtggtggtggcgggtggtagatgatgaaagattacttactggtgtgaaccttcaagatttgagacaagtcttagttaatttggaaagtttattttgccaagatggcattgaggatgtgcacccctaacagcctcaggaagtcctgacaatatatacccaaggtggttagggcatagcttagttttatacattttagagagacatgagacatcaatcaatgtatgtaagaagtgcactgattcagtctggaaaggcgggacaacttgaagcaaaggcaggaagactggaagcgggaacttacaggtcacagataagtgagatgaatggttgcattattttgagtttctgattagcctttttaaaggaggcaatcagatatgcatctatctcagtgagcagaggggtgactttgaatagaatgggaggcaggttggccctaaacagttcccagcttgacttttccttttagcttagtgatttgggggccccaagatttattttcctttcacactgggtataaggtacatgatttgagtgatggataccctaaaagccctgacttcactgctatgcaatctatgcatgtaacaaaattatacttgtaccccatacatttatacaagtaaaaataaataaataacaaaaacaaaacaaaaataacaatggccctagccataaagcaatttttaatttagcggggaggacagatatgtatctaaccagttatactggaaagtggagtgagctcaatatgctaaaatagaattattgtgcatcataaatgtttaagaggagggaaagggtaatctgactggagggattgaggaagattagagaagttgtcattgacttggccttgaggcaaaacaggggtttatttattcagcaaatcaatatgtattgagtgcctagaatttaggaatcattggaagggcatactgggaagagattatattgagatcaaagatcaaaagagaaaaaaatgcaaggaagtttttagaatgttgagtcacagaagggtcttaaagcaaagaactataggaggaaagaggcagttgaggaatgtaaactaggaatatggatcaggggcatttcatggattttactcatttttatacaagtaattgggatacttccttcagtcagcggcaaccatgaaaggttttgagttgagtgaaatgaacagagcatgatttattggtggatatgttggagggaaggaaaaattatactgaggaagaccaattagaaaaatttcacaatagtttaggcaaacaatgagggcagacagacccaggatagtggctgtagaaacaaaggaacagatgtgaagaattttatacagatgtgtgttgagattgcacagtggtgaaggcagggctttgggggcacccattactcaaataatgtacattgtatccagtgtgaaaggaaaataaatcttggggcccccaaaacatgaagctaaaggaaaaagtcaagttgagagacagaaaagatagaagaaaaaggcaaagagagctcaaaggttatcagcctgacagtgataagtgattaacagaggaagagtgtctgggtccatgaaatagtgatgtatttgggcaaatagagtctatgttgtctggggtgtaagctaaaagaatcatttagcaaatggagaagtgaaataagagagaagtatttcagggtcctctgtttggaggtgaatgacagttgaggccataagaggacatgatcgtatcaggcatagaatatagaacagagattctcagaattttccaactcattcacaatacccagaacagcagaggacacgaaagttttaactcaagttatttgatggcacagttcaaaatgcaacatttctttagtatcatgtgttttgctttaaaaatatggatagattctttattccactgcatgatgtagtcacacatttcttcctgattccagcactaatggacaaggttttgctgtattgagattcatttatttaatcaacaaatctttattgagtgtccagcatgcatcagacaccattccaggccctggggatatgtctgtgactgaaactggcaaagcctgtgatgacgcttacagtgttgtgagagggagacagacaagagaccagtaatggatgagatatttcagaaaacaagtactatgatggaagtaaaacatagtgatgagatgatgagtggtggggggcaacagcaaagacatggagtcaatctaggtgcctattgacacctaggtacatatacaccatgtggtaaatatataccatggaatattatgcaatcataaaaaagaacaaagtcatgtcctttcagcaacatggatgtagctagtggccattatcctaagtgaattaaagcaggaacagaaaaccaaatacctcatgttctcacttataatgggagctaaaccctggttatacacagatataaagatggaaacaatagacactagagactccaagagggaagagggagggagtggagcaagggttaagaaactatctattgggtacaatgttcactatttaggtgacaggttcaatagaagagcaaacctcaacatcatgcaacatatccatgtaacaaacctacacatgtgcctcctgaatctaaaattaaaaagaaaaaaagagagaaggaaaaaaatggcgggggaatgagagggtatgactaaacttctctgaagaggtaacctttgaactgagccctgaataacaacgaggatacagttatactttgggacaagtcacctggacagaaaaaatttgcgtgtgtaaaggcttttaggtgtgagaagctcattagtatggagaaaaaagaagtctacagaaacatgaagcagaatgaaattgaagagtgagcacggttctgggataccatgctgagaagtagattttattttaaatgccacagcaaatcattgagggttttcagcaagaagattaaacgatctgatttaagtttgtaaatgattcctctgcctagggtgtggaaaatgtgttgcatggggctagaagtgaaaactgggaaaacagctgaggggatggctaatggacttatcatggtgttgaaagtgatgagcaaaagactaacccctaaatattattcatcgagtttatcattttcctgtataattggactgagttaaagacagctaatcacatacattcggttcagtatcactacactttttcttgtcttggtgtttcctcattctcaggactcaaattaattaagtacatgtgagcactttaaagattttatgatctgtgcatgaggaatgatgtgtgaagataaggccagaatcataaatggaaggatgatgccatgttgtcaggctgctcttgccaaaaatgtgaatgtgtctatcttactgctgagtcattggtgcacttgtctacttgtctgggtggactaaaagagtctctagtccactgtttttgttgctgttgttgttgttttgttttaaacattcccatggaaatatttagcaaggacattttcaatgaagaaatatgaatagtgatctttgtttcgtgactaatgctgtaatttttgcacatgtaaatgaactgagcctcaaattattcacattctgatatatctctattcaactctcaaactatcatttcatgttataattttgctaccatttataaaaaccatcaccacattacctttttaatagttgaatgacagtgttctgactttgagggaaaaatctgctaactagacaatcccatgtgacccacaatttgttgttaagtataaaaaataaattaactcataatatttaggatttgtttgtttgttgtttctgagatagggtctcactgtattgcccaggctggagtgtagtggtgcaatcttgtctcactgggttcaactgattgaatgcagtgagactccacctcctgggtttaagtgattaatatttagggttttttttaaatcatgatgtctttgttacttacatggaaataaactaatttatggttgaattagaaaattctaaccatgagtactatttatatttttcaggaagaatacatctagtagtggcacaagctttctaagtctcttctcattatattagaattttacctaaaataataaatattaaaaatatggtatattgtaaaattttctagctttactaaatcattttacatgctgagaaaaatcaagaaaaaaagttgttttgagtggtctcttggtaaatgcaaaacactttaaagttaagactatgtctgctttacttggagttgaatccccaggatctagcatagtggttggtattcaagaagctcaaaactttgggatgaataaataaaatcattagttgctggagtagtcgggggcataatgtctttgattcaaactattgcttccaaaggtttgcttaacatagatgtgagtctaacatttttcttctaatgctcacatcttgctgcaaacgttttcataagttctactttcaagttctttggcaatatcttgacagactactttataagtgaggccaactaataaagtagttacatcatttacatctgtatcttcagtctaataattggtataaatccaatttatcttcatattcttgattattcaacaatgctttgtcctgtaaaaatacacctcaaaaatacatctcaagtgcctctttttgaatcagaacaaatctaatctaacttgcccacacagagctccaccaaactatcccttgccaggagttctaccttccttgctgcttttgaaacaaacaaaccttgatgatacttcaagcagttttttttttctctgcttgtttgtgcgtttgaagcattgctcataaccaagattttgctctcttgccttttaacttcaaactgtttttccaaattgatttatatgttatatattcaatggatgtttccgtggaacaatttttcagagttttccactgaacagctaaataaggctcattttgtatctccaccgtgatttaaaaacctctgttttaaatgaacatcaaaatatgacttacaaatttgtggccaactgcagtgctcatttggagttccataattgtgcttggggactgttacatgatgccttaaatcaccaaatgccctgtgatgtaccccatgcttcaaggttgttctgaattcatctcagtatcttttccatttttaccacttacaagcttttgctccaaacataactgcttgtgaccacctctgtaaatttctaattgaaactgtaattttaaataaatacatctttgaaacaataaatacagagtgacagttctctaaagttagaatctctagacttattgctattttcagactagcttcaacaagaaatgcaactaagcatagtttcatgtctgtacacagaacttttgtttaagtacatttgtggtacttgaaccacatgtggttgaaccagtggttatgtgtgtgcatgttcaatcaaaaataaaataaacaattatggtttgtaagaagacacactgttttataaattctctctctctttctctctccctctcacttatagttgaattagaaaattctaaccatgaatactatttattttttaaggaaaaatccatctaggtagtagtataagttttcttagtcttttctcattatattacagttttagctaaaatagtgaatattaaaaatattgtattttgtaaaattttttagttttactaagacattgtacatgttgaggaaaatcaagagcaaaattctctgacccattttttagagaaatactagccctatggttgggaattattagtgatatctgtggtcacagtcgtgcatacgttcactttgatttgattacagtgttagtgacacttgcttccccaacaactctgatgtaccatattttccagtcactcattatatgtgaatattttctacttacaggacttaaaacatgaagtttgctgacctggaatagtatgaattattctgcttctaaggttgtttcagccagccttataatgcaactagtgtgagaagcagtgacacaaaaaagaatagagccaaacttcaggtaacacccttttaggagtggagagaaggggacctgtagaagtagagaaagaaatctgaaaaggggaaaactaggagcatcagggtgattgatgcatgtgaagcaggaagaaaggcttaaaagacattgttagtggggaaatgaagacagataagaaaagaaacaggcctttggagctgaggtctaggaaattattggtggggggaatgcaactgaaattgctaggagttgagtcaggcagctatgagcaagttcaatggtaggtataaaccatgctttcaaacaaaaaagttgaaataagaaaacaagagcccagatgctaaggacatggggaaattaagaaaacagttgaggtagagaaagaatttaaggagggctgaatgctataatagctgccattatttgactgcttattatgcaccgtggagagttctaaatgctttagctaatttaatcttcatgagacacctaagagataaatcctgctattattattcatattttggataggagattaaggcacagagaggtcgtacaaacaagtgagtgtcaggattcaaagaaggaggttttgctccagaggcctcctgaatttaaccactgtgctagagacacagggacattcaatggagcattaatgtcccgagctggtgacaggtcgagctgaggctatagatgtgttgaggagtcagcatcagtggaggaggaaagagatgcggatggagggagactcggtgtctttgaaatagataagagagagagacaatgtaatggtttccacttggcacagaaagaaatgccttactaattagaggaccagggagacacaagaggagcctaagaagaatggaatgaattagaatcatcactgtggagtctgtgatagggagtcaactaaagtggaaataagtaattaccaaataacaatgaggggtcagcatcggcaaaggaatatgtttgtaatagaggcttcgcagctgtatctggagcctgggagcgcaggctgagagggacattgagatgtaatgagggatgtgacatcttagacagagagagagctgggatgctctcaagaacttcattgatatccctgtctgtaatagaaagaggtaagtatagcaaaaaagttagagccataattggttttcacattttaaaaattggattatgattaaaggaaaacatttaaagaccttgtctaaaggaatataaaattcttgagtctaggcactctccataacttaaattaacttccccatttcttctacaggaatactcctctgttataaggattcaataaatatggtgactttattgttattcgaaagattatagggaactttaggaggtggtatgggtacagaggagtccatctacaaaaacgtttttagcccatcttctaagctaagctgattttggaaaaggagctcttttaaggagaataaagctacaaaaatgacctttaaaactgtcctatccagactctggctctctaaattggaatctttgacaaaaccacagctggaagacagcagccagtaatacagcagccattaatacagctccatgtccaaagaggagggatgtttgtttctactaattacacaaaaacatgcaatattcagccaggtgtgatggctcacacctgcaatccttgcactttgggagatcaagtcagaagaatcacttgggcctaggagtttgagattagcctacacaatgtagcaaggctccatgtcttttaaaaaataaaattaaggtaaaaataaaataaaaatgcaatatttactgctaagatgtgcttcttgaggatggacttgaaatggtccaccaccaggacattaaagacagggtctgctcctgctttctcctgagagaggaagaacactggttagatttacagaagtatcaataccaatattcttagtgtatttagtattcctgcatttataacagagcatccggtaattgacttgaaatttgacctcagcttttcatccagtatgctaatgatggtataaaatttacactccttacataaataaatgtaccctcaaatgtgtcattttcctgcattgacagatggatcccatgcttaaaattaccacaaattcttattctgagcagctttgcacagcactctgcatccacttttgttgtttgccacgttatagcactgcttgtgccctgagcttgcgtctcaaggtggctacagcgtgacattttccttgaagagcgataggcagaatttaattgatttcattttgcttggattctcaaaggcttctgtggctatgcctattacctaacactgctctcaggaggtataaagctgtgtccagttgttcttgttgcatgtcattgagtgacttggtgccacttgcagcagcccttcttgcattccaatgactgcattcctgaatctattatgacatagagactctagggaccaatgaggttttgtgtaggagggctaacttttattttccccttatagttcctttgtctggattttccccctttcctatctatctttataaagagaccttaaatgaaggctacagctataagatgaacaaatagctggctattaaaaatctccaaattgtcatataaatgcaaacatgatcccaaatgattggtttgaataaaattcagactttactgattggaggtgggcaattcccagttataggctgaccttccacttccttcagagctaaccctctaaacaagattaagcttatgtctaggatgggagagagaatggctggaagaaaagaagatgtttcacttccttatgttgtggcttaatgtaatggcttaagaacaataattattttttttcctcacaatttgttaggccagatcaggtattggcttggtgattcttctcttcatgtggcatcaacctagctgcattcaactggtgacaggactgggctgagctgggctgggctgggttggtctgggctggaaattccaggaagccttcactcctatctgtggtgcctcagggctcctctgtatattatcttttttctttcactgtcatagtgttctctagagaaatagaaccaataggctgtgtgtgtgtatatgtatacatacagcctgtatgtttgtgtgtgtatgtgtgtatacataaacatacaaatgaggcatgcctcattttattgtgttttgctttatggtgcttgacagatattttattttttcaccaattgaaggtttgtgaaaactctacatctaacaagtgtattgatgccatttttccacagcatgtgctcactttgtgtctcattttggtaattctcacaatatttcaaactttttcattatcattatatttgttacggtgttatgtgtgaccaatgatctttgttgttactatcataattgtgttagggtttcaaaaaccatgcctatataagattgtgaacttaagtgatagattgtgtgttttctgactgctccaccaaccatccatttagtccatttattatctctctgtctctcctcaaacctccctattctctgagacacaacaatattaaaattaggccagttaataatcctacaatggcctctacatgttcaagagttttcaatctttttctttaaattaaaagctagaaatgattaatcttagtgaggaaggcacgttgaaagctgaaataggctggaagctaagcctcttgtgccaagcagctatccaagttgtgaatgcaaaaaaataaaataaaagttcttgaagttctgaattcttgaagcaaagaagttcttgaaggaaattgaaaaataccactccagtgaacacatgagtggtaagaaagcgaatagccttcttgctcatatagagaaagttttagtggtctggacagaaggttcaaaccagccacaacattcccttaaaccaaagcctaatctcaagcaagcgccaaactctccttatttctttgaaggctgagagaggtgaggaagctgaagaagaaaagtcagatgctaggagaggttggtgcatgaggtttaaaggagagaagccatctccataacatcaaagtaaaaggtgaagcagcaaatgatgtagaagctgcatcaagttacccagacctagctaatgccattgatcacagtggctacactaaataacagatttcaatgtagaggaaacagccttacattggaagagatgtcacctaggactttcatagttagagtggagaagtcagtgcctagcttcaaaggacaggttgactctactcttagggctaatgcagctggcgactttaaattaaagccagtgctcatttagcatttcaaaaatcctagggctcttaagaattatgctcactggtttcaaagaacttcttgactactgccttaatttcattatttgcccaggagttattcaggagcaggttgttcagtttccatgtagttgtgtggttttgaatgagtttcttaatcttgagttccagtttgactgtgatgtggtctgagagactgttatgatttcagttcatttgcatttgctgaggagtgttttacttccaattatgtgattgattttagagtaagttgtcttgtggcaccaagaagaatgtatattctattgtttttgggtggagagttctgcagatacctatcaggttcacttgacctagagctgagttcaggtcctgaatatccttgttaattttctgtcttgattatctgcctaatattgacagtagggtgtttaagtctaccactgttattgtgtctaagtctcttggtaggtctctaagaacttgttctatgaatctggctgttcatgtattgggtgcatatatatttaggatagttagcccttcttgttgaattaatccctttaccattatgtaatgtccttctttgtctcttttgatctttgttggtttaaaatctgttttgtcagaaactaggattgcaacccctgcttttttccgctttctattttcttggtaaattatcctccatccctttattttgagcctttgtgtatctttgcacatgagatgagtcccttgaatacagcacactgatgtgtcttgattctttatccagcttgccattctgtgtcttttaattggggcatttaactcatttacatttaaagttaatattgttatgtgtaaatttgatcctgtcatcatgatgctagctggttattttgcagacttgttgatgcagttgctatatagtgtccttggtctttatattttggtatggttttgcagtggtttgtaatggtttctcctttacatagtgcttccttcaggagctcttgcaaggcaggcctggtggtgactaattccctcatcatttgcttgtttaaaaaggattttatttctcctttgcttatgaagtttagtttggctgctttgaaattctgggtttgaaattcttttttttttttaagaatgttgaatcttggcccccaatctcttctagcttgtagggtttcttctgaaaggtctgctgttaatctgatggacatgaacagacacttctcaaaagtagacatacatacagccaacagacacatgagaaaaagctcaacattattgatcattacagaaatgcaaatcaaaaccacaatgagataccatctcatgccggtcagaattgcgattattaaaaggtcaagaaacaacagatactgttgaggctgtggagaaataggaacgcttttacactgtggctgggaatgtaaattagttcaaccattgtggaagacagtgtggcaattcctcaaagacctagaaccagaaataccatttgactcagcaatcccattactgggtatatgcccaaaggaatataaatcattctattataaaaatacatgcacatgtatgttcattgcagcactattcacaatagcaaaggcatggaatcaacccaaatgcccaccaatgatagactgcataaagaaaatatggtacatatacaccatggaacactatgcagtcataaaaaaaatgagattatattctttgcagggacatggatggagctggaagccattattctcagcaaactaactcaggaacagaaaacgaaacaccacatgttctcacttataagtgggagctgaacaatgagaacacatggacaaagggaggggaacaacacacactggggcccattcagggggtgctaggggagggagagcatcaggataaatagctaatgcatgtggggcttaagtcctaggtgatgagttgataggtgcaacaaaccaccaggacacacatttatctatgtgacaaacctgcatgtcctgcacgtgtatccaacaacttaaaattaaattaaattaaatatgctaaatctactctctttgtgctctataaatggaacaacaaagcctgtattaccgtatttctgtctgcagcatgatatactgaatattttaagcccactattgagacctactgcttaggaaaaagagatttatttcaaaatattactgctcattgacaacgcacctgatcactcaagaactctgatgaaggtatacaagaagatgaatgtttctctcatgcctgcaaaaacaacattcattctgcaatcaatggatctaggagtcattttgactttcaagtcatactatttaagaaacacatttcatacagctatagctgctatagatagtgatttctctaaaggatctgggcaaagtaaattttaaaacttctggaaagtatttactactctagatacaattaagaacatttatgactctcaggaagaggtcaagatatcaacatttaccggcatttggaagaagttgatgctaaccctcatgatgactttgaaagtttcaaggttgcagtagaggaagtaactgcagaagtggctgaattgctgcaatttcatgataaaacttgaagagatgaggagctacttcttatgggagccaagaaagtgatttcttgaaatggaatctacatctgatgaagacgctgtgaacattgttgaaatagcagcaaaggttttagaatataatataaacttacttgataaagcagtggcagggcttgagagaactgacttctattttgaaagaagatatactgagggaaaaatgttatcaaacagcaccacatgctacagagaaatctttcatgaaaggaagagtcaatggatgtggcaaacttcattgttgtattattttaagaaattgacatagccaccccaaccttcacaacccccactctgatcagtcatcagctaccaccatttaggcaagaccctctgtcagcaaaaagagtacaagttgctgaaggctcaggtgattgttagcattttctagtataaagtatttttaactaaagtgtgtacactttttagttacaatgccattacacacctaatagactgcaggatagtgcaatgtaaacataacttttatattcactgagaaacaaaaaaattcatgtgagttactgtattacaatatttgctttattgcagtggtctgaaactgtacctgctatatctttgaggtatgcctgtgtgtatgtgtatatatatgtatgtatacacacacacaaacacacacacacacacacacacacacacagagagagagagagaacagagattattttaagaatggcgtgaacccaggaggcagagcttgcagtgagccgagatcgtgccactgcactccagcctgggtgactgagtaagactctgtctcaaaaaaaaaaaaaaaagaattggttcatttggtcatggaagttggtgagtccaaaacgtgcaggatggtccagcagactgaagacccaaggagtggattttgcaactcaaatccgaaggctatcaactggcagatttccctcttcctttgagaacatcagttgtttttgttattgttgctcttaaggccttcaattctttgagtgaggcccatccacattatggagggtactctattttactcatttactgattaatctcatctaaaaagtagtttcacggcaatatagatatgtttgaccaaatatccaagtaccatgggctagccaagctgacatataaagttaatcatcatactctctgtgtagtgtctcatcatttagcccaaagaagcttgggcttctttacagcatagcagctggcttcccagggagagcaagtgggtctgtcagacctgggctcaggagtcccgggatatcattactgttgcattctattggtgaaagaaagtcacaggtctagctcatagctaaggggaagaaaactacaacctacttcatggtgtgaggaatagcatatgtgggcagggatgaggggaatagttggagactagctatcacaatcttccctctggccacagcacttcttgtcccttttcagaaagtctcatcacattacagtgctgggcccagcttcaaggtccaaaatcacataatctaaattgggtatatttaaagttgatgttccctctttatctagatacttgtacctaaaatgataccttctgtgtaatcccccttccctgcaacatacattgatgagacagggattgttgtatcgctagcaagaaagtcagccattcaaaaggagggaaatgagaggcacatagcaatcggtgcttcataaaaattctgagatccagctgggaacatgttaccaattccctcaaatctaggtttcctgaaaaggatcctgttctctggatgtggatttctattccattgttttcagtgcctgttgactctctcctctaagttaaccttccttttctgtaagaaatggccctcattcgcaaacggagtcactttgtgagactatttattccattaaaggtttggaggcctaaaatcttcttttcattttgtcctgtcactctcccttttcttccaaggtggcacagcttctttttaaactttgtaattttctaatgtatccagttatattccattccattgggcgaaagctatttccccaagtctctttaagacagacacttttcttctttagactgagagtcagaatcctgtgcagtaacgtttttaagagtttaatcacccttgtctcctagcagagtggaacttataagggttttaagaggtatcttactaccacattcttgacttgatatttaccctgaggccacattgtactagcagtacttgatttgatcagagaccattttttactctgaaaaccttctgccatctggaggggttgagaatgagaaataatattattttctaagccagcaagtcctgagttggactttgtggattaaaataacagtttcctatttctgatgggtaggattttcctgagtatgtcttctgctccatgtggtattgattaggtaggtcacttacgtggctacatttagtcaatagctggtctgggctggatggtccaagaaagtttcagtcatatacctggcacctctgagcttttccatatggcctctatgtggaatcatcttgggcttcctaatagtatggctgattcagactggtcagacttttttttttttttttttttttaaagtggagtcttgctctgttgccaggctggagtgcagtggcatgatctcggctcacggcaacctccgcctcctgggttcaagcaattctcctgcctcagcctcctgagtagctgggactacaggtgtgcaccaccatgcccagctaatttttgtattttttagcagagatggggtttcaccatgttggccaggatggtctcggtctcttgcaggctggtcagattttttatatggaggctgactccaagggaaggtgttttaaaggaacaggcctgcccaatgtgcaagcacttatctagcatttgcttgcataatttttctaatgtgccaaagtaagtcatatggcaaggccaggatcaacatgggagaaactacatgaagtggcagtgccaagaggtagcatttattatgggtcacccatataacaatctctcacacagagtagtttggtagctggacagaaataaatttgtcatcttcttgtaccttttactagtagtataacttagggcaaattgctgtgcttctgggattcttatttgctgcttgtaaaatagaaaacatgacacagatgctactagatctttgtgacaactgtacacacatatgcatacacacacacacgaggtactcacagtggtacttaacaatggctactatgttttaatggtgtacttggcagaccagcagttaggttttgaatggactaactgtggttttatcatatcaggaccaggttgtaatcagaaatcagcgcttgcatagctcaaggtgattaaaggtaaaaaggttaaaagttgagaagaaaggttggtgttagatactattagttcttggccaaaagctgttggccttgggagaggtggaagtttgagatcagggatcacagttatatgagaacacacagtgatggtgaagtttggaaccagaaaataagtcaggattatacggggtccaaaaaagcggagtcagggcactcatgaatctaaaccagatatagaagcttatggagtcagagagcagaaatcagggacacaggcaagaaatccaggaaaacaagaattagatatacccagtatgttgagacaaatagctatggggcgcagaggcaagagaaaaatttggtagtttggagccattgtctccaaacataattatagccaaaagtaaaacatgttcacagcatgtgggcagatcttgagccataggtggaaaaagacatctggttagaatacgatggcagcaaattggtagctcctgacatgcatcagaacccctttaaattttcatgggattcaggttgttccttcaattatttcaatgatctaatctttaacttcttgagaatatgatgttttcctaaaaaggggactcccacacagaaactgtcaggctatgaagctgtcgatggcatttgtagtactcacacagttcaaaaaaatgatgctatctctgccatcttttgttccatctgtagaatagtccattttttttggttatagcagtcgtcttccttgaatggttcctacccagagggaaatcggaattgccggtactcctatgtctcagttgcagaagtcaggattttttctgaatcattctgagcatcttatctttcctcatgctgattattatttcagtctgaaagcttatgctctcttataaagtcacattgtactttcgttttccattgaaaattctgaatagaataaaatgaaatcatttaaagtcatgtttaagaaaagtagagtttcttgattaaaaaggagaaatttagagtggcattcaaaagaaatacattaaaaggaaaaagtagcatgcactcatgcagttcttgttgggaggatagtttcttttccttctcattcggcccattaaaaagttcaattaatttcttttaaagatttcaattatgaatgtatcttaggcattgatagggagtaatttttagatctgacttatttttatatattattgttcatttttatagcttttctgagattcttggcagtgagtcagcacacagcatttctacctatagtccaatttatatgagtcctactttcatgcaccactgtgatagtgatgtctcggttagtggctatcatggtcagtagcctgaagatctatagcatctacatatttagaatggatttttaatgtctatgagagcctttatttctccactacccggttcctttgtggatcctgagtctgaggagaacataactgtcaattagaaccactttttaagaattgctgtaattaagatttttgatgaccgagttattaattaggaaacagggtctccatattttgctctgctgcttctttatgtcctagagcaagggtcagcatacttttactgtaaatggcctggtagtaaatatttccagctttgtgggccacatcatttctgctacaaatactaaactgccatgtggtacaacagcagaaaaggacctatgcatagactgctgtttttaatgtcaatatagtatcagtagaaaagacagggcttaataaaaactttgtgtaatatggtctctttggcataaaattaagaaatgtatagaagtaaacgttgttacaaaaacttttgcaaatgtgtgtcgcttttcccagcactcacgaataacagtcatttttaaccagacttctcgtttttgccaagtattatttgttctcatctagtaacagtctaggacaggtgtcagcaaactactgccacaggctaaatcctgcaccttgtcttttcctctcatgccacatagatattcaaatgaggaatctatgcacaggtctttgacccacccatcagcagaacatgccctttctggagctccatttctcactctcaatagtgctgaccacttaggaggagctgtccatgttcttttgtttgaaattctctatgaaaaatgacatcttttctgaagtgattgctggaactaatggggccttttgtgtttgcagacctgttttcctcagtgaagctggcagggactggtaaggaatcagaattacaatcttgtctttattagcactgtgtttgcatcagtcctctcctgagaaacagtgcaggttgagataaatttctcctgtgaagtgatacaattcattttcatctcacatatgcatggcctttgtgccatgcagaacacactttttactgttgttgatgtaagtgagatgttattaagaggttttagtttgagtttattttagataataccaataattgaatgctttactagtgtttactacaaaggtttaaaaaatcattactacctataaaactgagtaaaataaaaatgatttagaactaaagataatctcaaaattgcacattagatagctatcctatgttgtagaagatattcagtctgcatcataatatttgaaacaaatacaacatttcaccataagacaagagcaaaatgcacaaagaatcgagtgttccatgcaataggctttatgaacacaaagcctgtggccaaaatgaggcaagaggaagtatgaggggtacacagatgtcatgtgcagtaccacataccacccctggggagtgataaacttttttgtgtatttgcatttgactgatttttactttgtgaaaacataatgtgctggggaaaatcacatctgaatccacaaaatgtccatggtatattgacatgtacccctaatttatcaattttgtatgaatgtatttgcattagagaaacatgtttcagaatacattgtgctttgcaagtgtttgcactgttgcaaactatgtgctttatctcactgaatcttcacaattactgcatgcggtgggcactattttcatgcctgttctacaaatgagtagacatataaaagttaaataacttgccagtggctttgaggaaatacgtaacagtatattagagatgggattgagttattctaattttcaggaagaagaggaaagtgaattctccccacttatgtccttagggagtaggacattaattgtatttcttttagttctttttgcaaatgttactttcacagaggcttctcatggatccctatctaaaattactccccattctatagacttttgtttaaaaaaaatagaggccacaatgtacatactccaagaccaactgccattagccacataaccaaaatttaaattatctcaattttctccaaaatactaggtctaaccataaacaaaacgtgaaatgtgagcttttcatccttgtcaacatgactcagtaaaattaaaccaatcagctgcagacaaatcagcttaaacagttttacttgtcctaaaaggaatataagtttatgatagccaaccacagcgaagacagatgcagttccttaattatgctttataagctgcattttaaatgctgtgaacagagcttcttaccacttttgatttgaggtccctggtttgcaaactgtccttttgtatgctcaataaactttaaaaaatttttctaacttgatctgattttaacacattctatctactttagtgctttttatatcctaaacacatgacgctaacattctatatagctcacttgtttatactgtttattttctcttcccctacactagtgaaattctatgaaggcaggaatgtttgtcattgtcacactactgtatttccagtgcctaatataggcactcgataaataattattgaatgaatgaatcaatcaattgattaatcttaggaaaagttctttaatggatcttaaaaaaaaatcttgtgagcctttagaaaggaaagtgatgatcacctggagcttgtattaggtcactaatagtaaagcatatcagattaaataacttacttttcccataagaccagtgtatctgaggagtgctgctccccctgtctatctgaatttcaacgtttgataaaaaccttccatgatgaacttatgcttaagatgtaggaaggcagttgatgatactgttaggcagagtaacagctgaatgcctgtattcatgaatcaatgtttagagagagacctctagtaattggctgaaggatttggtcttcacatttcctgttcaccattttcattgttaattttgagggtggtattaatggcataaggagctaatccacagatgaaataaaaatggcaggaaccactaatatggctgttaacaaaatcagcatacaaaattacttgacagactaaatgggagaggtaaatataataagacaaaatactaaaatgaaaatataaagtctaaaacaccagagggaagtaggaactaatgttgtttgaggagcaataggagcaaaggtgagacatagtttaataacaactgtaggtttaggtggtagttacagaagcataaatcaataatatgacattattccccccaaatattcattcattcttgggtttcatgaatagaactgggtttagaatagaaaaggtaatgatttggctgtaaatttatgttgcttctcccatagctagagctatgaccccaatcctgggcaattcactttaagaactttgagaagtagtgtacacctaaaacttgcaatcctcatggaaagatgagtccaaactgtgtcacgtgaagaatacctaaagctgtggttccaaacttatggccttcagatgtgttctaaatggcccatatggggtttttagaaatttgaatttgcggcagatgtttcaaaattagtagatgtctcattaaatatagatttctgggatttactcttgctactgtgagggtgtgtgatcctgtgtttgtgttcctctcagaccactttactcatttactttaaatttctggtgcctatagcaatcggggtgctaacacccggggggataaaaaaggactggggaattcatggcctgtaaaacaaggttggggttggagagatataaatatatctggagagctttcatagggcagagcaattagacccaatctttgtgtccccaaaatgttaaacactggtattaataataagaaaacatatttccattaaccatatagaataactatcttatagtgacttgagactggctattttattcatcttttgttcatcagtaccgagaagagtttctgacaatgtttgtactcagccactcttaactgaataaatgtggcaaaacaggttgcgagtggtgaattccattccaggagcagctagaatatatgctctttgagagcagagatctttgtcaattttgtttacagctatatcagagcacctaaatcagtgcctgccatgtagtaggagctaattaaatatttgtagatttcataattggagatattcaaacatagaatcatggtctacttgtcagtgctgtaggaaaaagtaattaacaatataagtagagggtcatgaaacaagggaaatactgaagtagatgacatttaaagttactgccaaccctgaaagcctatcagacagtgacatagaatgggattatgtattttacattaaatattaagcatagtaaagttaaagtagtgtaggtatgtgtggtaacaaaactgagaaagcagtttgccagttatttatttatggtatggacaggaaattattggctagatttttaaatgaaaatatccaatagttgagatttttctgatatttaactatatcttatatcttatgtccatattgatgacagtgattattccattttcaatcgttttgtgtcatctaagcagcagttaatcattcctacgtgatgcaaatatacttttattccctggtatttgtaatttaacttacaaaacacacgttgccttgaggtttggcatgatttgttattctatccttcaagaagacccatgataacaaatcaaatcattgagaactgatttcagttttcattgtttggggtggtaactgaaggtgacgttttgaaaaatcatactataactaacctagaaaataatgttcagaggccaacatgtggcaaaggaacacatagttaagtatatagtttttaatagaaattctatgcaccttttattgtgaaggtctagcattttaatattttcaaaatccagaaagatgaaaaatttctttataaacttgaagggaaaataaaaagtctaaagccctgaatttgagttctagaaatgaatgtatttaaaatgcagtcctgaggtgctgtatgctaactatgtaaagcaatagcttattaaattcttggaaacttgctgtttatttgaaattggatatggtaatagatttttgttaaatgttattttataagggataacattttctcctgcttagtttcaggaaaaaagaaaagaagcacttaatttttaaaaggttaatggatacttaatggttggattagacctatgcatcatcatgtttacagcacagaacaatgggaaaaatttctattatggagcagtgccacataaccttaatatcctgtatcatcattatcatcattattatgtgttgagtatacaagcgtctatctctgaggaatacttagcaatttatgaatttgttttaattagttttctcagccttctcatagggcatgggggacatattgcttaaccctagttttagagccagccttaggtaaaatggtgatgcaaacactgttttactttggtgactcttctgcttgcagggatacctcctttttgcacagcaccttatttctccttctgtaaactaaaggagaaaattattatacatttttatacttaaaaatacgtagttgagaatttcaaatatatgcaaaagtacagagaatagtaattggttggcgcgaaagtaattgtgtttttttgccatttaatggcaaaaaccacaattgctttcgcccaacctaatataatgcatcttaaatactcatcacccagttttaacaattctcgatatacaactagttcttgtttcatctgtacctttacccatatttccttcctctacaattattttcaaattcaatacacaatatttcttcatctgtaagtcctttagtatgtatctaaaaatagtcttttaaaaattacctcaataacattaagatgcttgtaaattttcctaaaaaatttcctaataatttcttattatcaaatgtagctgatttttaaaacaattttattaaataattttaatttttggtatgaaatggtagcaactaaggttaacagatcgaaatcattatgtgtctgaattctcttttacactataaatttcctctttctatcctttctctctgcacccttttaaaaaaactgggtcatacatcttacagagtttctcataggttcaattttgctgattgtatctctattgtgttgttcaacctgtcctttgaattttctataattattagttaaatctaaaggcttgataaatgactaatgttttattattttgagaggataagcatattttgttttttgtttccccagctttattaaggtataaataataaataaaaattgtatatatttgaggtagacatgtgatgacttgatataggtatacattgtrtaatgattaccacaataaaattaatcaatgcatccatccctataaatggttaccttattctatgtatgtatgtgtgtgtatatgtgtgtgtgtgtgtggtaaggattaagtattaaggatacttaacatttactctcttagcaaacttaaacaatacagtattattatctattgtcaccaagctgcaatattaaatccccataatgtatttgtcttataactgaaagttagtatgctgtgtccaacattaccccatttctaccatgtcccagattctggcaaccaccattctactctctgttcctatgagttcaactatgttagattacacatataagcaagatcatacagcatctggctgtctgtgtctggtttatttcagttagcataatgtcctccaggtttatccatgttttctcaaatggcaggatttgtttttctttttactgttgaataatattccattgtatatacaccacagtttctctattaattcatttgtcaatggacacttaggttggttccataccttggctattgtcaataatgctgcaatgaagacgacaagtgcagacatctcttcagcatgctcctttcatttcctttggatatatacccaaacattagagtgctggatcatatggtatctctatttttaattttttgaggaatcttcatactgttttccataatggagttaccaatttacgttttcaccgcagtgctacaagcgttcccaattctccacatagtcaccaacactttttatgaccatcctaatgggtgtgagaagataccgcattgtggttttgatgtacatttccctggtgattaatgatggtgaacaccattttatataccttttggccatttgtatgtcatctttggagaaatgtctattcaagtcccttgcctatttttaaaatgggttattggagtgtttgctattgagttgtaggatttttttgtgtattttgaacatatcaggtacactcagccctttgtatctgtgggttatgcatcaagggattcaattatctgagaatcaaaaatatttgaaaaaacataataaaacaataaaaataattaaaaagtaatatagtataattatttacatagtgtttacatagtattagtattataaataacatagagatgatttaaagtatgcaggaggatgtatgtaggttatatgcaaatactatgctattttatatgcaggacttgagcatctgaagattttggtttctgcagagggtgggaaaggttgaaccaatcccccatggataccaaggtaaaactatgtatggtttgcaaatattttctatcatccatatgtagaaaatatttcattttgctgattgtttcctttgctgtgcaaaagcttttaagtctgatgtagtcccatttattttttattttgttgcctacacttttggtatcatattaaaataataatcaccaagaccagtgtcaagaagctttccacctgttttcttccaggagttttgtggtttaatgttttaatttcttttaagcacatttttgtattgtatgtaataaaatatggatacaatttcattcttttgcatatgaacatccagttttcccaggaacatttattgaagagactattatttccccattgtatattattcatgcccttgtcaaagactaactgattatatatgcagggtttatttctgggatctctattctgttccattgttctgtgtgtctgtttttatgccagtacctcactgttttgattactatagctttgtaatatagtttggaattagggagtatgacgcttccaactttgttcttcttcttcttcttttttttttttttttttttagatggagtctcgctctgttgcccaggctggagtgcagtggcatgatcttggctcactgcaacctctgcctcccaggttcaagcaattctctgcctcagcctctctagtagctgggattacaagcacctgccaccacgttcggctaatttttgtatttttagtagagataggatttcaccatcttggccaggctggtcttgaactcctgacctcatgatccacccacctaggcctcccaaagtgctgggattacaggcgtgagtcaccacgcccagccattcttctttcttaggactgctttgggtattcagggtcttttttggtttcatatgaattttacaatggttttctctatttctgtgaaaaattccattgaaattttgataaggattgcatttaatatgtagatcccatatggacattttaacaatatgaaatctttcaatccataaatatgggatatattttcattttcattaatgtctttaagtgtagagatctttcacctccttgggtaaattcattcctaagtattttgttcttttagatattattaaatgggattgtttttcttaatttattttacagatagtttattgttagtatatagaagtgcaactagttgctgtatgttgattttatatcttgtaaatttgctgaattattttcttaattatgacagttttttagtgaagtctttagagtttttttttaaatatagaaaatgtcatctgcaaatctaatttggatgccttttatttctttttcttgcctaattgctctggctagggctttcattactgtgtkgaacacaaatggcaagagtaagcattcttgttttgtttcagattttagagaagcagctttcagttttccaccatttagtgtgatgttagctgtgggcttctcaaatatggcgtttattgtcttgaggttcattccttctattcctaatttgttgagagtttttgtcatgaaaggatgttggattttgtcaaacactgtttctgcctctatggagatgattatagatcatatgatctttatctttcattgtgttcattcggtatattacattttttgatttgtgtatattggatcatacttgcaaatctaggataaattccacttaatcatggtgaattatatttttaatgtattgtcaaattcagtttgctagtattttgtttaggacttttgcatttatgttcaccagggatactgccctgtaattttttttcttatagggtccttatctgattctggtctgttggtaatgctggcctcataaaatgaatttggaagtgttcccttctcttcactttttttggaagagtttgagaagcatttgtattaattcttaaaatgcttgctacaattcacccttgttgccacatggtcctgtgcttttctttgttaggagtttttttttttaattatggattcaatcttcttacttgctattggtctgttgaggttcatgtaatatatttccctatccctttgctttcagcctatgtgtatccttaaggcttaagtgagtctcttattgtcccaatatgagacagcattttgttggattttttttaattcattcagccactttgtgtcttttgattgaataatttaatccatttatatccaagattattatttataggtaaggagttattactgccatttaaaaaattgctttctgatgggtttgtggttcttgtgcttttttttgttgttgctgtcttgtgatttgttgatattttgtagtggtgtgctttgattccttgttgtcttttctggatctattagagtttttttttttttttcctttgtaattactatgggactttcaaaaaacatcttgtagcatcttttaattataatattttattttaagctgatgacaagttaatttcaatcacatacaaaaactctacacttttactttcccccgtcattttgtgctactgatgtcatgctttgcatctttttgtattgcatatccattaacaaattactgtaactatggtttatttttaattattttaccttttaacttttattctaaatttagaaataatttatacatcaccattaccacatgcaagtatacagaatttaattatgtatttaccttttccagtgagttgtatacttatatatgtatttatgttgttatttagcagcttttcattccaacttgaagaatcacattagtatttcttataaggcaggtcttgtggtaatgaacatcctcagtttttgtttgtctgggaatgtctttacctctccatttctgaaggctaactttgcagggtacagtattcttatttgacaggcttttttctttcaatgttttgaatatattattccatattatttatttgttatccatgtaggcttgcattggtgtctgtgaatttgaagaagcaaacagtctttcggtctttacaggctgattttaacaaccttctcttccaccaatggcagacctgttattaggtatgcagataggcgtggttccctctgggtttctggaggactccccctggctctctgagtatgtctatgggtagggagaaccgtccccagatcaacatgagagagcttggaactaagtcactgctgcttcagggtccacatctgagaggacttgcctccagggagttggatgggcatacatctctggggacaagattgaccttgggccaagtctaagtgggaatggagcaaagttatagggccatctcagaatctgctgtggaaccaagtttggcaagcctgtctccgagaacatggatgggaatgagtcctgacaggtcgctaagtggagacaggactgctctcaggccacagtttcagttttaggatatcatagttagcagacagctctatacaaaactctactcctttatatctctgcccatttatgttatcaatgtcacatattacagctttttatattttgcatttgttaacatagttttatatttatattttataattaagttctataccagagttaaaaataatttatgcaccaccattgcaatattatacgatttttatttgtctaaatatttaccttttcctttgtgttgctgtctagcatactttgtctcaactcaaaggactccttttagcaattcttgtaagtcaagtctagtgctaaagaactaccttagccattgtttatctttatttctcctccattttcaaaatacagttttgccagaaagagtatgcttggttgacagactttttctttcagcactttgaatatattgtcccactcccttctggcctataatgtttctcctgagaaatctgctaatgtcattgaaggtcgcttgcacatgatgagccattttctcttcctgctttcaggattccctttttgtctttgatatttgacagtttgattataatttatgttggtatgttggtttttccacgtttgagttttatcagtgtcttgaatttggttgttcatttccttcctcagatttggcaagtatctagccattgtttttttcaaataagctttctgtccttctctctttctatcatctccttctcagatttgcattatgtgtatgttggaacacttgatggtgtcccatatgtttcttagtctttcttcacttttcttcattcttctttttttcctctttgtatctctggcttcataattttaagtggcctctctttgagttcatttattctttcttctgcttgatggagtcatctgttgaaatgctctagtgaacttttcaactcaattactgtattcatctccatgaatgtttgttttctttttgaagtttgttgatattctcattttgttcctgcatcattttcctaatttcatttagttttctgtctgtgctctcttctagcacattgaacttctttaatattatttttaattatttgccaagtaacataaatttttatttctttctggttggtacctggaggtgtattttgttcctttgattgtgtcatgtttccctgtttctttgtgtgcctagttatttttttctgtgatttgtgcatttgaaaaagcagccacctcttcagtccttataaattggcttcatacaggggaagacttttaccaattagcccacatagagattttgggagcctctccagttttgttttgtttttttttttttttaccacgggatacatcttctttgaatttgtgtgtgttctttcccagttagagtgatttgcttctttttcttccaagagcttttaatctccttctccgtctggtgtctgtctgtaccactgcaggttctgtggcattgcaataagccactgagttaccttttgctctctgcagaccccaggcatccaaagtatgtagattccattagtgctctgaatcaggcaagacagaaaccagtctctcagacaacactctgaaaaaccagaacattggacatacattccactcttctctttctctcctaagggagaagtcataaggtgtgatttatttttcctgatgacaccaagctgtgctggcttggaggaagggctgtcatggttgacgtgaaatgccttttctcatctgtttcaatgagactattattttctttaagtttgcctcaggcactgcaacttcttgactggtttctagacttttcataaaactttttggatcatatattattgctaagttggcgtctctggtggagaattagctctctcgctgatgaaactctacagaatacttttacagtatttaatattgctcttatttcatctcacacgtacatagtcactttcctaacacttatataattgttctcttcccaatagctagtagtgtttcctgtaacacatattgacacatactaagttcttatataagaaaatatttaagggaattttgtatttttccactaaactttctgttgattatttgaaggtaccacacttttggttgttattgtggcttcatggtaaaattttatatgtattagagcaagaccgtaaccatgttatattttataacatggcctaattcctccaaaaagtaaaataaaaaactaaaaaagagatgattttcttgcaataacattaaacttagaaaattattcaaaggaacatcagtcttgattatataagtcttggaaaagttgtatagatttcttaatctaagttctacttatttctttctgagcttatttttaaacattttggttttgtttgtttttataaatgagatgttggtgtggtaattttaacaactggtctttgattttataaataaaagccttttgcatattttactttaaaactggacaaacttacctgactattcttattttcaattatttttcagttgatttttctgggtttcctacattaaactaggttgtaatcaaataaggataaagttgccttcacttttcttatagttttatgcctcctatttctattcctcacattgggttactgaatttgttagaggtttttgaaaaatgggggcaatgttacatttgggctaaaactatgaacattgatatcagctaaacctggtctcaaaactctgaaggatcctcagttagaactgagaggtcttaaaagacgaggtggctagagggaggtctgcacacacattgccatgagtcctcagaccacatgagacattcttttttgtctgaagcaaggctggagccaggcctagatggcctgtggaaagctcccatggaaccagcctgctgttctcattccaggcaaactaacctctgtacagttgatagtgtcactatggacaaactaacctgtttaagcttcatttccaaatctgtatcatgggaatagtaacagttttttgtacagtttttataagaatcaagtagctacctatacaatatatgtaatacaataaatattactaagtttctattattatcctgatcttaagcatgaacctatgctttaccagtagctataatgttaaatataagtttaatataaacattcttttgatccatagtttgtttatcaaggggatattttgtagttatctgaatatcaaagccaaaagcaaagcaacatttctggctctctgcatgtggaaagggaacttagctttactttgtctcccctttcctcccacagcccaatatttgttagtttattctagatttacatacccagtttatcattataaatatatcatcacttaaatgatggttttaggtttttctttcatgtttatacacatagttttgattggtattggtatttaaataaaacttgagaatgaagacaatagatcctttgtatttcttttaaggttgtgatttgacccctggttcctcaagtgagaaacttttcaaaacacttgagagagtaaactggctgagttttacctatacttactgtaagacataatttttagctgctaaaaaaacaatgttagtttcttttctacacttgggattctattactgtatgtaactgtgaaggaaataattgacagaactcatgtttttccttattttttttccttcctctactaacaaaatagaattgactttattttttaaagtcagccaggaaatgtacaatgctatttacaaaaggttaattgaatcctagagttgcagatcgagtttcttgttgatgagaatatacagtagaatattactgaatgagagatttttctattccttttttggaaactttttggaagttttgatgactgagttataggaaattggctttagaaggacttcagtgatttctgtctcttctaatcagtatgaaatcacagcctatatttggattatgctctgtgaatgtttgaaacctatctgttatctttgtgttaacctgaggtagaaattttcatttttatatagaattagttttgcaagagtatcttttctatatacaaatatccatttgaaaattgattgtgttaagtcgatacaatgcccttttctatattaaaggacaggatgtttattgccttgacttgtttgtttcctgtaaagttatttgggcaataatagcattcagttttaagataaaacatacataataagtaatgagacaagaggaaaaacatttggcataaggcttagagaaatttaaggctcattttccattattgctttagtgcattattaacaatttcatggggacatgaaagactaatatatggagaaaatgtctgctattggcatataatatgttaagattgcaaatatgacttttaatccactgtgataatagcctattaaattgtatcctagtccttgaagagtcactaacattatcttgtttatactacaaaattaggtacagggaaactttacttttacagaacttaatgttgcatcaaactaactggacaggaaaaaaaaggaatgtggcattggaagtgataaaacaaaacacatcctctgcctatgactgtcttcttcctggacctatctgactatttaacatgctgacctttacaatgctctgcatagtgtaggctcactgaaagcactgagtgtctgaaatccttcattcttatttaaaacaaaataggtgaaaatacttaatcatgatgtctatatatttgaaagaatatttgaacatggggagagacccaaccagtttgagtggctgaagttttggaatttttatagaaattccctattatgtgtttcaactttatgcctgacttataataatagttacaaatactacattgctagtaacaccaatatctaataccatttcctctttcctaatttcttgcagttgaagaaatggagatgagtatgtctatatgcttcactctttcctcagcaagatttatttagcatatgttttgttccaggcactggctaagtgctaggggtacaaaagttgttttgtctcccttccttccagatgtgtccatgtgtccaggctaacagagtgagtagtcacacaggcaaatcattctcctacagttgtcaggctgaaggctgacttggtgtcataaataaaaaggcagaagatatttgtattcattgtcttggatgatattttcaacttgagtaggcagattgaaaagaaaaatgcggccgggtgcagtggctcacacctgtaatcccagcactttgggaggccgaggcggtggatcacctgaggtcaagagtttgagaccagcctggccaacatgatgaaactccgtctctactaaaaatacaaaaaattagctgggtgtggtggcaggtgcctgtaatcccagctacttgggaggctgaggcagaagaatcacttgaacttggaaggcgagggttgcagtgagctgagatcatgccattgcaatccagcctgggcaacaagagcaaaactccatctcaaaaaaaaaaaaaagaaagaaagaaagaaaagaaaagagaaatggttgaaggatagcagcttggacaatgcctaggttttaaagacagttaattgaggagccagcaatgagactaaatgaaaatgactggagaagcagatagacagaaagcaaaaataaatgtccaatttatggggtgatctacatctttttttgtctgcaacagtccaggtgttctctttttgtcgatgtcacaactggctagcactttctttcaacttgcaaaagtgttatgtactccagtaaaccctaagttctctgttacagctttgatcatatactggtgattatctgtctattatatttttcctcaaatgaactgtaagtgcttaagcaaaaggaggtgcctaattcatctctgcattttcagtacccgacacaagcatcaaaggtagtaggtgctcaataaatgattaattgggaaattaataggaatggaaacacaattaagataggttgaactcctttagagatatacacataaaatagtactacctgtaacaagaaaatgctaaatttttgtggattaccccaacagaagattatctgtggctcgtgtaccccaaattaagtgtttctgattggcaagtgtctctcatgtaaataatgattaagaaaccatggcttcttccatcttgtgactctaccatcttcaacacatggtgaggggctacagaggggaagagaaatagggggttgtactcacaaaatttttatgtggcaggcctgaaagtggcacatacacagacccatacacatttccttaacttataatcaatgagcatgtaatgtaacactcactgacatctctatagctacctgtaagggagtctggagatgtggtctcactgcatgccaagaaagaaacattctttcctgcaatgcctatatatgtatatgtataaatatatatatgtatatacatgtttacatatgtatgtatatatatatgtgtgtatacatatactgtatgtgtgtatatgtatatatacacacacacacacatcttaaggggattttcttatagaaattttatttctcccccctctctatatatatatgaaataaatatcagagactgtgagattattaagaaccacagaaatttatttaaccctagtaatgtgcatgcctgtgttttaaaggccattaagtagtttattgtctacttttgaaagaaaaaaaattaaacaaagaaattaattaaatatcttggataaaaactgaaacaaacaaaaaggaaaataataataataaatttaacattcatccattgtaagtgtcaattattatggaattgcttactttaggcatgtatttcagaaagaattttatgcagtaaaaagcataacattaaagttatttgtctgtcaattattccatataagttggctaatttttgaatataattttattttactacaaggtagcaggttcatattacagttatttcaatatgtgagcatttcttttattttgatattgcatatcttgaagccgaatatatttctaagtcccatcaatagcaaggtgaatgttgtatcattttattattatgacttttattatacttttaaaattgaaaaacaagacatctttattatagggaatacagaagctcataattaataaagatactaaaacaaaattattaccaatattgcacaggagagccattttagagaattaggatacatccttaaacaattgttttatgaatataatatgtgacttttttgttttgttttgatattattgttttataaaaatgggagcactctataatctgttcttcccactcaacattgtgtcattaacatgattacgtattcttctacattattttaacagcctcatagtatttcatcatatgatgtatcaacatttactaagccaatccttcagtacagcaattagattacatccagttatttgctattataaatgagctgcagtgaacatctttgtgcctggatatttgccaaacagttttattaaactatgtctaaaatgtcaaaaccattagttctcaaactttaatatgcactggaatgatactggtgacttattcagactcataagccctactcatagagattgtgtttaggaagatctggaataagacccgggagtctgaattttagcaagcaccatctatgattctaatgcagagggtttgaatgtcacattttgagaaataatgacttggagacattagaaatactatcttttttccatcttctccctgccataatgccattttctaacaataacataagatacttattgctctggtgattagttttacatctctctccaaaataaaggcatttaacctcttaccttctacctgataaggttgttctttttatttctgaaccataactgatacacattgatctagagtgtgaaaaaagcctcttatactgttttggaatggaaaatgttagaatatagccctctagtgctttatcatttttattgtaaagataaaagtatttatagaaagtgggtttaaactaacagagtataagcatgagtgtaaacttcatttttagtagagataattatctcaaaaaagttacgtcttgaggcagttttatctaaaaaagaatgtcaaaaacattaagtcattcaacagataacctcagttatataaagcatttttgcaattgcaatgctaacacccagagtaggcagctaaatgcttataaaaagatgttaactttggccagctatatttagtgctactgaagctttgctagactcatcctttgttcttcttttctatgttcatccagaagaagagtatttacacatgtattagtcagggttctctagagggacagaactaataggatacatgtatatgtgaaagggagtttgttaaggagtattgactcacacgatcacaaggtgaagtcccacaataggcggtctgtaagctgaggagcaaggaagccaattcgagtcccaaaacttcaaaagtaagtaaagtggcagtgcaaggatccaaaaacccatcactctgtagaagcatgttgtaacatttgatgattctataattctcatcacactcaaaagtaggaaagctgttttcagtctgtggctcaaggcccaagagtccctggaaaaccacttgtgtaggtccaagagtccacctgtttaagaacaggagtctgatgatcgagagcaggaaacatccagcacagaagaaagatgcaggccagaagactccggcattccagtccttccatgtttctctgcctgcttttaacccagctgtgcttgcagctgattagatggtgcctacccacatggagggtgggtctgactctccctgtacactgactgaaatgttaatcttctttggtaacaccctcacagacacacccaggaacaatactttgtatccttcaatccaatcaagttgacactcagtattaaccatcacaacacataagtcattaacttaatcatgacctgtttccaatccaggaatgaagttctgttcttagaggaacttcctaagtacataagtacacagaggctcactttcccaatctaaaagctaagactgttccaagtgcatatgctttctgtttttttctatatttgttatctcacagaaacattgatttgccattggttcttgcaaaatcagtattttataactggaggtggtgttaaggtttattttgtataaccttttgattttatccctatggagactaaagaccagcaaggttaagaccagcagatctggaacaggttattatagaaatttgtatattatgttgttgctagcaaatggaattattgcaaggagatgatggaaaagatagtatttctgatatctccaagccattgtttttcaaaatgtgttgttcaaaccctccgcattgggatcagaggtggtgcatactaaaattcagactcccaggtcctattccagatctgctggtcttagccttgcttgtctttagtctctgcagacaaaaaatcaagacattatacaaaataaaccttaagaccccttccagttatgaagtactctgattttgtaacaaccaatggcacctcttaagaccacctgagtaattactggcagagcaggggataaaatttctatcctctcatttaatgacagattgtcattcatttctaatgtttatgtagggctgctctcatctcagttctgtttaatttttcaaatgaaaatgtgaagcttattgagttatgatcaattagtgtgtgttctgttattttctactaatactcactctgccagtgactatacttgttaaggtagtgcagcatggtggcttttagctccagttttaactagaagagatttgggtttggatcctgacatgtagggtgatcaatcatcctggtttccttgggactgtggggtttccctggacataggactttgagtgctaaaatcaaaaggtcccaggcgaagtaagatgattaatcaccccactagccatgtggctctgtcatgataggtctctgggttttttaatgggtaaaattggaaaagcaagaagaagtaactcataggattttagtaaaaattaaatgagacagtatatgtaaaacacggcactacttaataaagactcagtaagtattagtcattattattgatgttttataaagcaagtagattcctcaaagcacagattctcagaatttaggatttgaaataaatgaactttctttttagctttgacctctttttttttgtttgttttttaaatcttctcagtacccttctgtcgtcttgtctatacaactggacaatacaacccaaggttggatagagtccaccatctcacatccttttaccttttttcaagatataaatcaggaagacaaaaattttctatttgggaatcaatgtgaagagtgagcatcaaagacagcatagagctatggagaaaggggaaattagcctggattataataacagctgccattttgttgagtgcaaactctttgccagatattggtgcttcaaatactttatatatttggtccacacaatgactccgagaggtaaatattattatctcagtcttcagatggagaaacaacctcaatgagcctaagtgacttgcccaaagatagttgtatagtaaggagtgtaataaatgaggtctggatgttccaagctcgatgaatgtccaactttcagccagctggttaattttgagaaatataaacttcttcacctgtaaaactcagaagggaaggaaattgccatatatgagtgctaatcccaatgcaagtaatgaactatgcacatcatatgcatgatctcatttaattcttgtatgtaaatattagtcccatttttataataaagaaacagaagccttagagagactaagcaacacactatcaatacaaatagtaaagtggcagtgcaaagattcaaaaacccaacactctatagaagcatgttataacatttggtgattctataattctcagtatgtggatataataaatattgctagagtagactttccagccatttggaaataattattgctcatgtgatagtatatttttctcaactagaatcaaaatattaacttttgacctgggtttacctttgcatgtggataacatggatcaaatttgcaaaattctgctgagctgtgacttaaatacagttctactgggtcctcaagtttcttttaaagtcttttttttcttactaccctctcagtcttataaaaattggcaagagtatatctgagtaaatgtgacatatgaaaacatatgtttcaaatatggccttaaatatgcagaaaaaataggacttttcttcctctctcttcatgggcatgcatgtaagaaagatatatataaatatacagtcatgtgctatataacattttagtcaactatggaccatacataccatggtggccataagattataatactgtatttttactgtatctttcctatgtttagatatacttagatacacaaatatttcccattgtgttataattgcctacagtatttattacagtaacaatgtaccatctaggtttgtttaaatacactgtgatgttcacacaaggaaatttcctaatgatgcatttctcagaatggatcattatcaagtgatgcataactgtatgtgtgtgtgtgtatatatatatatatatatatatatatatgacacatgcatatgtcaatgtatatatttaatgatgtttgcaattcatttcatagaagttataaaaacattttgatttatccttgattttatagaattcacacacaaagctaataaattctaagattactgaagatgttagttaactgttttaaccaagccacacctggtgaacaaatttgctattttaaaaataaatttagattttagttaatcaaatattgttcagttaatgtcactgttttctagatagcatttttcatgtatacattttacttaatttctttcccaggaaagtattaagccattatgtaatgataaacagtgtgatttttgttgattatatgtactttcttgaattattacctcaggcctctgaggaaacactacattccagtaatgaagaggaagaccctttccgcggaatggaaccctatcttgtccggagactttcatgtcgcaatattcagcttccccctctcgccttcagacagttggaacaagctgacttgaaaagtgaatcagagaacattcaacgaccaaccagcctccccctgaagattctgccgctgattgctatcacttctgcagaatccagtgggtgagtgccctcagatgtcatttccccattttatattttagatggtgattgttgtctgtggtcttttgagtttttgtggctcattgcttgatttgagtgggagaacaatggggtttctagagtcaaaaaaaaaaggatgaatttctcaggtgacatttctatatctgcaggagaagacattttagtgaaattgttttacatggaagagctgaaaatgtattggtgaatgctaataaacatttgccaaagggcagttgtacttggaaaattaatattggccatatgtgacttgatagaagacattttaacaaatgagaactaatggacaaattaccatgtagtgatacatgtctagaaacaataggaaatgttcactgatgcaaaatgaatttggaatcaagaataaattgtattgtaattagaatcaaaagaaatatgcaatggtattcatgagtctaaaaattttgcctttgacattttgaggtattgcttaccagaatactatttcagctcccagtataaggtgattttatttagcattagtacttatagaggagtcagccacagccacgtctccatcatgtaacatttttatttcctactttgcagggtataatttttgtttttattctttttcgtgttgtttaccaatggagttttacactttaaagcaatgtcaccagtttaaaaattgtgaaagaaagtaaggatattgggcacatcaattatttgttcttgtgaccagctgcatttttaagaagcctggatagaaaggaaagaggatgaagccagtgggccatacatagatagactcttgaacatttgctaaaactacaagaacaaaacaattactatgctacaaatgtgatggtcccacattctctgccaagttaaaggcatctctggggaaaatgtcttttggatcttgttaaagttaggaaggttgtgctcagaggaaatttggctagtaactcaactcaaagatactgaatttagctgttttacttgttattgaccagtctaagggacctgtgttagaaaaaggtatgaggaaaatactactagataaataataagaaaacaaatattcaccttgaagcaatgaaaagaggaaatatattttgtttctgttgttgtaattgaactatgtgtttaaagaagaatgcacacacattgatcagactcatactaaagcagatgggaattttatatgacagcttgacctgaacattttttgaaaaatgctgttcccctgaaactatttctcctttctttggaaataacattgctgccgttcattctgtgtagaagagattcacagatatcaggtgtatccagggatcccaagatcaccctcgggttcaatgatttgctagcagagctctcataattcagcaaatagtcatattcatggctctgatgtgttatagcaaaaggattcaatgcaaaataagcaaagggaaaggtagatggaacaaaatctggaggaaaccaaacataagcttccaagagtccccaagtgaagtaagacaagatacacttaattcctccagtaatgagttgagacaacacttgtgaaatgtgttcaccagggatgcctttaccagggaagcctattaaagactcagtacctagagtttttactggaggccagtcacttaggtaccctctgcctaggatatacaaacttccagatttccagaaggaaagtggatatgcagcataaaccacattatttgcacagacagtttaggcaaattgagccagtcttaccatttagagaatggtggatcactcctgaaagtcaggtctgctaaaggccaatgtttcaaacaggtcttcctatatttaattgacacagtcctgattaactgtttactacacaccaggttatcttagaatagttatcttactttcttcacacttgtggaagaagagattataattaaaattaaaatgcactaatttaaagccctgatatattcaattagctttggtatctcaaaaattttggttgctaaccatgatttctcattttgagttggtgttatatcatgtgcccttaaaataaaatgatgcaatatacctaatatatctctatgtagttggatattgtgtgtaatctaaaatcttgagctgggcgcagtggctcatgcctgtaatcccagcactttgggaggccgaggcagggattgattgacctcatgaatttgaggcaagcctgggcaacatggcaagaccttgtctctatcaaaaacacaaataaataactgggtgtagtggcatgcgcctgtggtcccagctactcagcaggctgatgcaggaggatcgcttcagcctgcttgaaggcagaggttgcagtgagtcaagatcctgccactgcaccctggcctgggtgtcagagagagaatgtattgctaaaaacagtttccaagtgccaaggaacttcagggttccgaattgtctatgtcccagcatttctgttgattcacattcatttccatcttcattaagatttaagaatcaagtacaattgacccttgaacaatacaggtttgaactgcacaggttcctttatatgaggattcttttcaaccaaacacaaatggaaaatatagtattcctgggatgtgaaactcatgtatacagatgggctgacttttcatatatgtgggttccacagggccaattgcaagaattgagtatgcatgaattttggtacatgtggtagacccgaaaccaatcccctacatataccaaggaatgactatgtaagcaatgtcatgcttactatttacaaatttatccaatattatgaagaaaataatttttctttttgaaagatggaacaagggtttcatttcaaaagaaacaatagacaataatggccaatcaacaagaaccaaactaagtagatattaaaggtattgttattacatttggaagccagaacaatttgcgaattgaatattgaggactagaaaattcaggagtataactttctggaatgtcgaagctttggaggagaagtagaaggtaaagtgcggggccaggtgcagtggctcacgcctgtaatcccagcactttgggaggctgaggcgggcagatcacaaggtgaggagatcaagaccatcctggctaacacggtgaaacccagtctgtacgaaaaatacaaaaaaaaattagccgggcttggcagtgtgtgcctgcagtcccagctactcaggaggctgaggcaagaggatggcgtgaacccgggaggcagaggttgcagtgagccgagattacgccactgcactccagcctgggcgacagagtgagactctgtctcaaaataaaaaacaaaaaacaaaaaacaaaaaacgaaaggtgaagttcgggcttatattctgtagccattttagttaaccaggagccccagattcctttacagctgtcagaaagagctaatgggaaatttagcctattttaactgagttgtctccagcccattgcctcattattaaaggttagtatgcctttaagtcccattgccaacctatactgagaccataccttagcaattgcaaatctttgatggtcaaggcgacttttcatgccctccagatttattttcctttctttcttaacatcatagccttttgctctttcttctggcatatcagtatgccagatactttctttgtcaagtgtcaggcagtgggtctagagacttgtaccacccctttagaaagccacagtatggccctgagaatcattagtttctgaaaaagaactttgatgtgcagaaataagtgtcgtagatgacagctattagcttcctcatgaagtacttgggtcaagagactgagttcaaaaggacttttagttattcacacttccatatttctactttgactttttttcccaagcaatgcgaatgtgttcaaatgtacactttttaacaatttcttttgagtatgcccaaactgttaggttgtgtgtatgctgtgatttagcaaacttaagaaactgtaaatgaacagaaaacagaattattaagacctgggatgcctataaccctgaattcatctgccagttaactttctgtacagggtaggcgaattcaggcttcatggctgtttactgaccttcctcgaagtaagagagacagctattaatgacttgaaatgttatgaacgtggcatagaagtaatttggaaagtcagtttttcatattttcctcctaaataattttctattacctttcataaaatctttttattaaggtataatttacatgcattatacatcttgaattaatatgtatttatactgtcatgtaatcaccatcctatttctcaactgatcactaaaggttattttgcctcctcttggacttcacataaatggaattgtactgtatgtacttgttgtgtctggcttctattagtcaaaatttttttttgatatccatgtttgtgtatatctcagcagcttgtttttattgcataaatatagcataatgtatttatttttactctcttactaatgaacctttgggttgtttctagtttgaggggattatgaatgaagctgctatgtacacttataccagtctttttgtgaatatatgcactcatttcttttgggtatattcccaggagtagcatttctgagtcataaggaggcaaatatttattttcattactgcccaacagttttctaaagtgttgtactcttttaccctcccaccagcaatacgtagtaggtacagttgttctacattctcaccaacacttagtattttcagtctttttcattttggtcattctggtgaatgtgtagtggtatactactgtggttttaatttacatttccccgatgagtaggaatattgcttaccttttgatgtgtttattgaacatttggatatcttctttgtgttatgaccattcagacatttgttcagtttttattttacttattgatttctgagggctctttgtatattctagacatgagtattttgttagacatgtgtattataaagtgaatattttgttctaaacagtgtcttgaatttttactttatgtttactttgaatatgttggtaatcctagggacctgtgaaatatgagggaagtgtgcagcagggagaggaaactgtaaggcaagaagtggacccaccttaataaggggaaaacaagaatgacatttaacctgcagagcaatttcacttggagacaaggacagctggtcccttgaatattggatggtggcaaataagacatccaagcactaagagggcaggcagagaagagttgagaatgaagcaacagcatgcttatggtggctgatggccgggtagtgagtagacaagagtggggctctggacatagatggtctgaatttgagtcctgtctcccacctactaccatcttgtgaaggtacttaaccactccaagttcctaattttaaaaaagcaaaagtaggaataatgcgagcacctacttcatgggtttgttctaatggtatactacctatccccatttttcacatattgtgaatacttaatatataacatcaaaaactgcaactcctatgctgggaaaatattagaacaaataatgtttgttgttgttaatatttgtttacttattggaattggcttcagagatactctacaaataactcttggggtagagatggatgttctagcagatttgggagtcaatcagaaattggctcctgtttcagaaagttacagttattatggacttgtgacatttctgttcagaagtctgtatctggcatcttcccgcacacatgtcttgctttcaagtgctgttcagttatgtttggaatgagaatggtggtctccctacttctgcttcacttcttccacaaccttgctgacttctaaatagtttcctgcttagaatccttaggaggaattaggatctcctttcagccctatcttgggcactgacttacattcccacatgtggtccatgtgcccctagacaatctaaggagagtctagcttgccacacatgtggaaatcattcccagttcacaggtgggaagttatgggaatgaagaaaatgtgggggaggtagcaataaaactctctacttacatttcattgctgcatctgctataataaaatgagagccaagagcaacttattcccttgtgacatgatgacacacctctggatagatgtatattcagggatatgggtgggtggagaatgttacaaacactttctcatccctagtatcctattacctgtctgaagaagtacactgtgtaccttcgtatcactatgtcctataaaaaaagaaaatgaaaagaatgtaaaagaagacatggtcacttttggggataaatttaactacccaacagagagagaagaattactttattcatataagggttcattttacaaggatcttccagaaatatttccttgatttgtgtgctattcacagagggactggtcacagatgccagttagacattggattctttgactaaccactcttcatcttgtgctcttgagtacaaacagtacgttagagagaacattaaaaaaaagattgttttcagcaatttattcctgaatcaaaatccaaacagaaaataaaaaaggaaaaacagaaggctggatcagacacatctgatctttcaaatttggccttttaaacttaagaaggtattaatgggcatttcatattttaaataatttggatataagggtgtttataaagctagagattgtatttcacagtctaccatgaagcctgtaccttcatgtttgatgtatgttcaagctttaagtgatttatctaagttcttattgaatgttatatggaagatctataacccactaggcaaagcttcccaaaattgaaaataaaacacataatcatgattgtgaaacattctgtagaaatatagtattcttgagctagatgaaattttaaaagtaatcaatgccaaaaattgggaaacaatacttccaataatcttgaagatgcatactaagcagacaaaattggattcttttggttttgattgatttacatgcaatttatgattgtagtgtttatctaaacttctcaggatactcacaaaatatcacaagccttttattttaaagcattgttctgatttaatcttatctgtctttgccttaaactttgtaaatttgtgattatttttgttttgttttgttttgttttgtttttgaaacggagtcttgctgtgtcacccaggctggagtgaaatggcgtgatctcggctcactgcaacctccgccccccaggttcaagcgattctcctgcctcagcctcccaagtagctgagacgacaggcatgtcccaccacaccaggctaatttttgtatttttagtagaaatggggttttgccatgttggccaggctgttctcaaactcctggccttatgaaatcttcctgcctcagcctcccaaagtgctgggactacaggcgtgagccatcatgcctggccccaaatttgtgattttcaagattaaaattagattctaagagtgatggagcactttaaaatatctggataaaaatcatcttatttccagaatcagggcaattcttgaatctaatctaaaataagcaatgtaaaaatgctgacttttttctcacctatcatagactctctaaaaggtttatgctatatctgccatgccttcaatttacaaaataatatgatcatgattaaactccagtgtctttttcaggttatcacagtaccttttcattattgtagtacattctggtgtccccattaaggatatgctgaatggactgatactataccacagtattttactttatatctgtgtgtcagtaaagcagcatgtaccaggggaaggtttacctttagaaatcaaaggcttctatttcaccaggctcccacgttgttaaaaacactaaagagggtgacaacttctgcgttcaccaacatcagagcatctagtccctattttcaaaactttcttgtgccaatatgacttgttttagtaatagagattggttggggaatcccatattttttaaggcaaacccaaggaagcatttattttaccgtgaaaagtgctagggcacaatactatattaagcacaaggcagaactcaacaaagccctttcctttgattatttccatcactcaataataattgttccactccatagatagtttctttgcaacaaacactgccctggctgaccatccttctgtaatgcagaactgtgaatcactgaagtgtttaaggagagcttataattctttaaaagcctttttattctgttttacagtatttgtgtttatgaaaaaaatgcaggtaaaaatattctgaccaaattgtatttgtttaattattatgtattgcataatgtataatactgattcaaacttaacatgaccagagtgcattgcttggagaaatccaaaatgaaaaatatattttcagttgaaattcattaaaggatgaagtaatcaaactttttttctctacaaatgagcactacaaaatggcaaaagttttcttttaaaaaatctgtatatagaaaaaaactatagaaaaaatatatcacttcttgggttaaacacacttccccccaaccaaaaaaaaattctaggtacttagaattctttctagaacttagaatttccatattatttttcatcccatttctctcattcatttagaatctgccctccagttgaaaggaagtagatggagccgggcacttttagattatttcaaatctgaggaattcaacaaaaataaatgctatttagttatgttgtttgaagtcatgtatgcaacatatctggatgatgggtcaactttgtttaatagattagcatcatttacactgaagttcgtggctctgagcttcgttaaagtgagacctttgtccacattcccaggagggctttttctcagggggttctgaattttaccatgacgtaattcctaaacagttgtgattagtgctaaatgttatcataaacacacacacacacacacacaccccttgctgtgtgaaagctagatatagatattaaaaactttagaatacttgttttttaaatatgtaatttataatatataaataatatttagaatataaagtttataatacataaatactatacttctttaccattcactttctagaactttcccagcttttgatcacatatttcaagggtggtctccctctttactcctctactaactcttctgtgtctcagttaacatgtgattttggctttcttatttctccaacattatttaattcagactaactttatttcttgaaggtatataccagacatacctcggagatattgtgggttcagatccaggccactgcaataaagcaaatatcacaataaagcaagtcacacatactttttggctttccagtgcatataaaacttatgtttacactatattgtagtgtgtaatagcattgtctctaagaaaacaatgtacatgccttaagtaagaaatacttaattgctaaaaaaaaaaatgctaacaaccattagagccttcagcaagtcagaaacattttgctggtggagagtcttgcctcaatgttcatgactgctgactgatcaaggtggtggttgctgaagattggggtggctgtgacaatttcttagaataacactacagtgaaaattgccacatccattgattcctcctttcatgaacaatttctctgtagcatgcaatggtgtttgacagcattttacccatagtagaacttctttcaaaattggagtcaatcctcttaaacgctgctgctggtttatctactaagtttatataatattttaaatcctttgttgccatttcaacaatgttcacagcatctttaccagaagtagattctgtctcaagaaaccattttctttgcttcatccaagaaacaactcctcattctttcaagttttatcataagattgcagtaatttcattacaacttcaggttccatttctaattctagttctcttgcaatttccagcacatctgcagttactttctccacttgaacccctcagagtcatccatgagggttggaatcaatttcttccaaactcttgttaatgttgatattttgacctatgcctatggatcacaaatattcttaatggcatctagaatggtgaatcctgtccagaaagttttcgacttactttgccctgatccatcagagaaataagtgtctatcatagcgatagccctatgaaatgtatttcttaaataataaggcttaaaagttgaaatgactccttggaacatgggcttcagaatgaatgttgtggtagcaggcatgataacattaacctccttgtgcatctccagcaaagctcttgagtgactaggtgcattgtcaatgaacagtcatattttgaaaagaatctttttttctgagcagtatgtctcaacagtgggctcaaaatatttagtaaaccatgctgtaaacagatacactgtcatccagtccttatttttttatttataaagcacaggcaaagtagatttagcacaattctcaaaggccctagaattattggaatattaaatgaacattgtcttcaacttaaagttaccatctgcattagctcctaccaggagagtcagattttcctttgaagctttgaagccaggcattgacttttcctctctagctatgaaagttgtagatggtatcttctcccaatagaaggctattttgtctccactgaaaatctgttgtttagtgtagtgccttcatcattgatcttagttagactttctggataacttgtcacagtttatacatcagcacttgctgcttcacttcacactcctttttttttccagcttttattttaggttcagagggtatttatgcagctttgttaaatgggtagcttgtgcaccctgtacttttatgtattggagatggcttcttttctttaaacatcatgaaccaccctctgctggcatccaacttttcgtctgcagtccttaactctctcagacttcattgaattaaagagagttagggccttgtttgggattaggctttggcttaagggaatgttgcggctggtttgatcttctatccagaccactgaagttttctccacattatcaataaggctgtttggctttcttgtcatttctgtgttcaccagagtagtacttttaatttccttcaaaagctttttctttgtattcacaacttggctaactggtacaaaaggcctggctttcagcctgtcttggcttttgacatgtcttcctcactaagccttattatgtctagcttttgacttaatgcgagagacctgtaactcttcctttcacttgaacacttataggccattgtaaggttattaattggcctaatttcaatattattgtgtgtcagggaatagggagacctgaggaaaagagagaaattggggaatggccagtcagtgaagcagtgagaatacatgcaacattaatccattaagtttactgtcttacatgggcatggtttgtggcaccccaaaaattaaaatagtaacatccaagaccactgatcacagatcaccctagcagatataataataatgaaaaagttcataatattctgagaataccaaaatatgacatagaaacacaaagtgagtacatgttattggaaaaaatggtgccaatagacttgcttgatgcagcattgccacaatattcaattggtaaaagcacaatattgtgaagtgtgataaagcaatgtgttagtctgttttgcatggctataaaggaatacgtgtgactggctaatttacaaagaaaagagatttatttggctcattgtttagcagggtgtctgggcaaggcaccagcatctgcttggcttttgtgaggcttcaggaagcttttattcatggcagaaggtgaagggggagcagctttgtcagatgacaagagagggaataagagagggggcaggtgccatattctttaaacaattagatctcacaataactcatgaccacagggagggcaccaagccatttatgagggctctgaccccatgacccaagcatctcccactaggcccaccatcaacattgggaatcaaatctcaacatgagatttggagggtataaatacccaaaccatatcaagcaaagcacaataaaacaagtatgcctgtatttatacacatattacaaaacagaattaaaaacaataaaatcatacatgcaagggattctggtaaatatactgatcccctcaatcatgcattagtcatatattaatgtattcactttatattcaaccaacaaatagtgagagtctgatatttgctgtatactgaggtatgcactggcgacccaaggctcaacaagacaaaacacagccttttctttcacaggggattgaatcaagtagggcacgtgcaagaaaatagaccactataatcttgtttgtttcatataatgtacaaatatgactgcagacaaatggagaaatatgaaatctcactggggagcaaactcactttggcttgtgaggaactaacacctaacctgagaccaaaataagatggttccaggaagagagaacagcaggtcaaagtccagggatgagattaaagtagagtgtctgcacttagctaaataaaaactgctaaaacatggctagaccagaatgccaattgaaggtacagttgataaaacttaccattaacttttcatgtaaccaatatgtgaggttttgtaatattttccagtatgctaagcagctatgatataaacactgaaaaggcaaacagttggattattccaaaattggaaagcaggtgcaatataagaaaaatagggcaagggatttgaaggtatttgaaagaaagtgatagaaatgatgaattgtggcaacttagctggttatggaaatgagtgaatataagaagatactgatatagaaagtattcaaggtctctagaaatctctatgatgtcaaacaggtgaattagaataactgagcaaacaaaagatagatcatatttggaggacagaatgaactttaagatgtaagtgctagaggtaatttaaggtatgttcaagacatagaagggtgtcagggaagagggtgactgccttggaaaagatgtagctgaggaactgagagatcggggcatgaggtgatgcctccacatcaacatcaaagtcacccaggactgcagcaggattcaagctgtcaagatgacaaaaaggtgggcagttttcagtgaatgagaaactgaccaaagggactggcagaagtcagagacaaggaagtagagttgattggcatagatgtcaaacgagaagtttttacaagaaggtggaggagtaagtaaaagtgagtaaccaggagagcacccatttcatcttgggacccagagagggcattgagaaccagagtaccttaccctgaatccaccacagggaagtgacatctttagcgaagagtcaaatttgagagaggttaggatctgggatgactttttggtggcaaggctgaggatgaagtgaagtctgtttgccatgggaaaagggatccagagaaactgattgaataatatggaaagaatgagaatgggaggatagacaggggagagaaatcacagtgcaacatggggataagaagttgaaagaacacagggagaggaagaagctctgtatcaggtggttgtctgagatatgattatgaaacagcattccaaaatattttcaataattggtccacctgtcctctgactgatgggtgttaaaccagggaacaagaagttgagcatagctagtaggtcttttggaaagaccataacgtttgtcctagtcccagtaagtaggtctgcaatggtgtccttgggttcctagtacatttcagcatctattggagaataggagcttctggtgtttcagtacttctgcatcttccagattactcagctgtttcccagatttattacagtctctggagtatggagaaggatctgattttttaaaaaatatgaattatcattttcaaagtattagtttattttaaataatttttatatctaactctaatattttgccagcaataataacatcttaggtattttgaattagcatttgagtttgcttttgagaattttagttcttagaaataataattgaattaaacactattgctttcttatatattcttaaatactatttctggcattcaagcattattccagttcgtcatgctgccaattttagcaataaaataaagaataaaattgaattcaatgtggaaaaattctatttgtagaaaacattcgtctgtaaacggggttactgttgtgaccttagtgaaacaacagaaaggcacgtgcatacggttttgcccttagcttggatgtaacatattatttgcagactttaagtcatagcaacctatgatcatgctaatttttatttaaggctatttgatagagttgtatgattgagacctggaaccaagatccttgatgtaatacatatgtgcacacaatttttttattctcttctctttggtgaccttgtctgggtcatttttttgtttgtttgtttaatttacactgtttgaaacagtatctgtgactagaatttggcaactgtagagtatatcatatgtacacagtgccttagcaaagggttttaattaaactcagtggaggagacccaagcagaggagccttcatttgtcttaagaagaaatgtcaaggttaattgattttcagaggattatctgcaacaaataaagaccaagactcatatcttcttattttggcttataaattctggtatgttctgttcaatatccactgaaaaaaactgagatgagagtgtttctataaaactctatatgtcaaagcatcctttgcagttggcaaaactgaatgaatgacagtgaaaatgtatacttatggattatgatatagtcattaaaatgattattatgataagtatatggtaacatggaagtatttagaatgttttgaggagaaaagcaaaatatacaagtatatccaggttaaagttaaaacactgcaaaatatatgcctgcatgtggctgagaactggaaaacaatgtgaaaataatttgaattttttgatttacaaaattgtggttttttatttttctcacattgatttctattaatgaaaataagtgtttatccaatcaataaaattacattaaaatttattatttatttacaatttcattcatacaaattcatctattgtgtcttagtatatgacagacacagtttgaggtactgggaatattttatatgtagattttaaaaattcatgaacttttgtttttcacaggcaatccaataggaagttttggcaactatggtgggaggtagggatacttgggcctttcagaattctccagatcactttgtataaccattcctctgttggtgaccgactccccaaaaaagatcaccagcagaaccaagtgaaactaagtattcatctcagtgaaataagggaggacatcacctttaaaattagtagtattttggaaaggggaagtaaagggaagatatttgtagagttttatagccaggtctgggagcctgatcttgcaaggtggaaaaatggctggcattaggcagaatttagagcctagcagttctggattagtggggtctctaagagcagtgaggttctcaaagtgaaccttgataagtgaactgttagtcttattgaataagctggttcaggccatttacagccttattttccaaaagcaaacatttcctggagcaagtacctaagttatttttgcttggtctccatgtgctcagcattaaaacaggcatttaaactttgactccaaattgtttagcactgggacagaaaagtattttggtttcagtttttaccttctttgtgagcgacctaggtttgatcaactcatttggctgacaagccggatcctttgtcccttattttatttttttagacttatattattgtcacctatattgcttggaaatttaggaaacacagtccttgggatagctggggggatgagaagtcaagagaggtaaggtcttagggtagacaactgggtagatactgggctactcagtatccaatcctcttctgttttgggggagtttcagaataggtgagagaaaggacctagccttccactaggggagtaggaatatgcattccctctgcatgcccctctggcagacagagggagggtctataacctcaatgtagtcaatctgatgttcctagccaggactttgaatcttgaggggatggctcagaccatcacatatgccactatcgagtggaagggccagtggcatctgttgtagctgctgacagtgtggcgaagagcagtgtgtgcccagcaggtgaggaatagggtcccaggcagactgatccagcctcccagctgcttattatcttcactggattctgctcaagtctgcttcttcaagctccctgtttattctgagttctatcctatattcttttgatggattccttttcctgcttatgtcaatccatcatttctattgtttgcaaatcacagcccttgatcactctagaaactaaagtacagaaagtgccctgactttgctagaagtttaggtgtaaaattagtagtaaagttagtaaggaaaaaccaaaggggaagattgaattttattttaatgcattatttttttacataaaaagataacaaaaggagggtagtgaagagaagagtctcttgagatgtccgtggcaaagtttttaaagctctcaataaggagacaaggactgggcttcattgcaattattcccttttgactgttgaagctggtaggcttacaatggactcctaatgagagtggtttgcactacaattaattaagtgcatgacattataaactgcatgtctcttccctctggagaatattcttcctatataagtgctattttgttttaatttctctctctgtctcttcctctctgtttccctctctttgtctctctctcttttttatttatttatttattttttattattatactttaagttttagggtacatgtgtacattgtgcaggttagttacgtatgtatacatgtgccatgctggtgcgctgcacccactaactcgtcatctagcattaggtatatctcccaaagctatccctcccccctccccccaccccacaacagtccccagagtgtgatgttccccttcctgtgtccatgtgatctcattgttcaattcccacctataagtgagaatatgcggtgtttggttttttgttcttgcgatagtttactgagaatgatgatttccaatttcatccatgtccctacaaaggacatgacctcatcattttttatggccacatagtattccatggtgtatatgtgccacattttcttaatccagtctatcattgttggacatttgggttggttccaagtctttgctattgtgaatagtgccacaataaacatacgtgtgcatgtgtctttatagcagcatgatttatagtcctttgggtatatacccagtaatgggatggctgggtcaaatggtatttctagttctagatccctgaggaatcgccacactgacttccacaatggttgaactagtttacagtcccaccaacagtgtaaaagtgttcctatttctccacatcctctccagcacctgttgcttcctgactttttaatgatcaccattctaactggtgtgagatggtatctcattgtggttttgatttgcatttctctgatggccagtgatggtgagcattttttcatgtgttttttggctgcacaaatgtcttcttttgagaagtgtctgttcatgtccttcaccactttttgatggggttgtttgtttttttcttgtaaatttgtttaagttcattgtagattctggatattagccctttgtcagatgagtaggttgcgaaaattttctcccattttgtaggttgcctgttcactctgatgatagtttcttttgctgtacagaagctctttagtttaattagatcccatttgtcaattttggcttttgttgccattgcttttggtgttttagacatgaagtccttgcccatgcctgtgtcctgaatggtattgcctaggttttcttctagggtttttatggttttaggtctaacgtttaagtctttaatcaaaagttgtccctgaaggaaaattaactctgctgttagtccactgagaaagcttctcttttaatactggaacatatctttgtctaactctccctcacacctagtgctaaatttatcagcgttgttcctgatacaaacattttgaagacaatcgtgaggaaaaagatgaaaaaagttgcatttaacttttgttacaggtgtccttgttctccagaagttactgtctttgttgtagtgtgcatgcagtcacaggagtgtgcatacatgtgtgaagtacttgagaagtgtatttgtccgttctcacactgctataaagaactgccctagacggggtaatttacaaaagaaagaggtttaattgactcacagttcagcatggctggggaggcctcaggaaacttacaatcatggcagaaggggaagcaaacccttcttcacgtggtggcagcaaggagaactgcagagcaaagtggggaaaagcctctataaaaccatcagctctcatgagaactcactatcacgagaacagtatggaggtaactgtccccatggttcaattaccttctaccaggtctctcctgtgacacatggggattatgagaactacaattcaaaagatgagatatgggtggggacacagccaaaccatgtcaagaagtatttcagagacaagtcattccccaaaccttatcatcagggtcaagacctggcaggtgagacattagcaggtgaacacaacattctcagaaacccttgagagtactcctttccctccaggcatcttctttcaaccttaatatattctattcaattatattcacagctttttacctcaattataattccattcttccaaatttgttttcttctcccatctttcctcctaataaaatatctattcttcagatagtcttcctttgtaaaatagaaaggatctacaaaagccattctttgtgagatgtgaatcatttcaaataaattaatgccttgttctaatgtgaatggtggacttgtgaagagaagtgggtagatatttgaatttctgaatgctttagaatattagttgcacatgcagtaatatttcctgtagcttagaagaaattggttggcttaacagaaaatgcaattaaaatagtttacaaataggttctggcatcaataatagaaatattaaagaaactacatattatatcaagatgcttctctttttttcggggggggggtgccttttcttccttgatgaacacagtactctttcttctttgtcttttatcttccatctcaaattgtcaataataaatttgaagaatggagaataatacattatcacgtgccagaccttatgctaaacactggatatgttatattgtgtttcatactcaggatgatgctacggtaggtaccattattatcttattttacttataagaaaacagaagcctggagaagttaaacaatttcctcagtatcagaaagaaccaagatcaaatatctaggttaaggtattttatcttaacctagatatgccagaatatcaaatctaggtttcactattattttgtattctatccaaatttctaaaactgctaatgatggagggctgttatatggttctagctttatatatttttttatttcaacttttattttagatatatgggtatttgtacagatttgttacatgggattattgcatgatgcttaggtatggtatatcccattaccctgatagtgagcatagtacaagataggtaattttttaatgcatcccaccctccctctaccctctagtagtccatggtgtctattgttcccatatttatacatatgtccacgtgtgctgaatgcttagctctcacttataagtgagaatgtgcaatatttggttttccattcctgtgttaatttgcttaagaatatggcacccagtgggccgggcgcagtggctcacacctgtaatcccagcactttgggaggtcgagacaggtggatcacctgaggtcaggagttctaaaccagcctgaccaacatggagaaaccccgtctctactaaaactacaaaattagccaggcgtggtggcgcatgcctgtaatcccagctactcgggaggctaaagtaggagaattgcttgaacccaggaggtggaggttgtggtgagctgagatcgggtcattgcactccagcctgggcaataagagtgaaactcactctcaaaaaaaaaaaaaaaaaaaaaaaaargcatatggctcccagctccattcatgttgctgcaaaagacatgattttattctgttttggggttgcatagtattctatagtatatatgtaccacattttctttatgcaatctactattgatgggcacctgggttgattccacatctttgctattgtgaatagtgcagtgatgagcatatgagtgcatgtgtctttttagtagaattatttatttttgtggaagtatatacctggtaatgggattgctgggtcaaatggtaattctgttttaagttctttgagaaatctccagactgctttccaaaataactggactaatttacattcccaccaatggtgtataagcattcccttttcagcctcgccagtatctgtcattttttgacttttttataatagccatcctgactggtgtgagatggtatcttattgtggttttgatttgcatttctctgatgattagtgacgtaagcatttttcatatatttcttggccacttgtatgtcttctgttcatgaagccctttgcccactttttaatggggttatgtgttttttgcttattgatttgtttaagttccctgtagatagtgaaaattaggccattgtcatatgcatagtttgcaaatatattcttccattttgcaggtcttctgtttactctgttagtttctttgctgtgcagaagctatctagttggccatcttggcatctaatctttaattttctttctaaaatatttgaatgttttgcaatttctgactgaagttacttccctctttctgaagaaggccctgctgacatcaataattatctgagagtgacataagctgactccgattatgccaaagtaacccttacgtggtatgaaaagaaaatgaaggtgactatgattcctggggcatttgagattctgagaaaactccaggtcagctcgccataaaaattccccacacctgtagtttaatttaccaattaggaaattatatatttggggctaaatggtttctgatttgttggcctgaaagaaataatgtacttttaacaactataaaagttctctgctaggaatatcttaaatacagtgaaaatctgccttgacagtggacagtaagttagatttcattgttgtaaattggcaccattaactaaaacccttgtccattcaaaataatatgtattgtcacataacactaagctctgttattaaactgccacagattattgctttaacagtttgaaaatgatttttagaaaattgactttgtacaatgctatattagagtctgttaattgatgagaaaaccaaactcagatgacatttgcaaaaataaaattggcatcagttgaaacatctgtaccatttctcttatttaaaagacatttttcatctggaaaatgactacttcgattagcctcagatcacaaccacaaaataaagttgtctatgggtggcttcttatttgcatttaaattattatgttgcagcattttgtatgcacaagcaaatggaagattgttttgaatgacataggcctatacacctgagagagaaatatgtcatctacaaaatgtaaaaatataggtttttgtaaatgcctctgaaaggattataagaatctacattttcccctccctcctggagtttgtctttctattaaggctctagacgaagaaaagctctaatatactttccttggaggggtcatgagacaatgaagcataataggatttgaagtatattggatataaaattcatgtgatatcctcaagtagagagatgttattttactgttctttaatctttactgttggcgataattgcctttgtaaactaactttatgttgtaaactagtagcgaaccagagattgagttgagaggtgggggtaacagatgagatcctcacttgtgagggctccaagggcctgtgaggcaatggaaagggctgaccttgctacctggatgggaacaatgctgttatcattttcatgtgctcctgtttagaagatgagttaacatccataaaaacaagttagactaagggttgtcacactacagcctgtgggccaaatgctgcctgccacttgttttataaatgaaggtttcttggagcttgcactactactgcagagtagagtagtggagatggagaccattcggcctgcagagtcaacaatgtttaatatctggtgctttacagaaaaactttgccaagccttgatttagacttagtaactttagtaagaagttactgactgcacaaattaccaggatatttaagcttgtaaagtattaaaataccataactatctgcttcttgtggcagggagggggccaaggagaggtgaagtggttataatgctcgtgcattggttccttcattcaccagagtgattgtgcgccctctctgaaacagggataatgccaggtactcaagatacagcagtgagcaaaaagaggcatagtgccttccttaatggagatatgcattggagtcacatagcataataatgttgacaaatatccctgctctcatggatcaagaggttagagttttagggtaaccatggaagatctcactgagaatgtaactttgaataaaggattagaggacttgaggaagccaaccatgctgctagagtttctctgcagaggaaaggggagtgatgagatataggtgaaggacaatgtgagccaagattgttttttttaagttgaggaattaacagcatggttgtatgctgagggggacaattcagtggagagggaaaaattgatgttgcaggaaattgctgggataatgtctttgagcagataaaaagggattgatccagtgtacaacagaagggactagtcttggttttggatcaaggacagtttatccatagtaaaataagagaacgtagagtatatgggcacagatgcaggtcattgggtagtcgtggtggttgaaaattgtagaagttctttttttaaaactttaatttttcttagtatgtgcaaaggccttgaagcaaaatagagcatggtataatcaaagaattgagagaagaaaaacataatctaactgtaaattaagcaataccatggagccagatgaggctgacgaggtacacaggatacagacgtcagcaagactaagaatatggtaatgctaaaccaattaagaatggggttaaatcaaatttgcctttttaaaaaaagatgactgtggctactgatagagattggataggagagtgcaacaagagtttctgtggagagaccaatcaggaagctactgcagtaattcaggtgggaaatgaaggcwtcatggtctagagtagagggagtggggagaagagaaatgatcagattttgagagatatttagaggcagagtagatagacttacctcacttatgtttgggtatagaagacattgcctatgtaaagactgagtagagaagagagcctaggagtagatgtggacactcaggagaaggattgagatcctggtttagaacactgagtgaagaagctgggtattgttaaagaagagagccaaacttcacaactgcctagcagtgaagaagcagatcaacaaaaatcatatggtgcggaagggatacttgccattagattagtccagctgaagccaaacgctggttgcttctgatttttttaaatcctataaatatattggttaattttatttaaaaaaattgaacttttcattctcataatgagaccaaagtaaaggtcaaaatcttaagaagagaatgggtcagaacatagcaggcagattgttgtttgacatgatgtcaatggacacttcagttgtcatgttctaggcccattacattggcctttcctcttttgaagcttctctcatggaaccaagtgcattttatatctgcatctgttccaaatatgggtataacacagactctgtgagtagcctgcaatgtgtttcccttccacatattgctagataactctgcttataaaaatctgcttgcaaaaatcatagaacttgcagatcctgtcaaaagaattactattagatgaagttaagaaatgactgtagaagtaaaagaacaagagctggtcttaggagttccatcccttcatcagtctaggagggttgggatcttagaggcatttttgagctgaaaactcaaggcaggaaacaagccatcccactctgaatagggctgtgtttctcacctgaacagtgagaagagggtgttatattttctaataaaatcccacattaagttagacaaaaactctgtataactatggaatagactttactaatggaaagagtaatgtgaaaagctaaataggaaaattttaggcacgtattttcacaatagatcttgctgtacttgggggaggcttgtcttcttgattactaaggttaacttagtgcttcagaagccagcccgtttttatgttctgctgttttcctgattttggtgtgtcttgatgccactgtgttctagtaaaaattcccttcaatagactgccaggagagcagaccagggagtgtgagtgttttgtgcatgggcgagcacatacagatgttaggtgacagtggttattcagtcatgctttcagacctggagaacagttcaggtcaaaatctccaagtctgtggaatgaagctttgggggaattaatcaaaatgttactgaaagaaaagggaaatcaaatctgacttccacccctctgagatttttgttgaggacacagaatgagagcataaccttcaggtccagagtggaatatagagagatcttccactgacaatatgctatcaacaaaagcaaggtagagaggaaacgttgagcctcagcaacctgtaagtcaagaccctctccatcatccctagatgcttttgctctgtcattgggattgtgtccctttctataacactgtgacttctttggatctccacagcctgactgtgttcacgttctcctctccagtcttttagtttctcttacagagctggtgcatttctgtggggacagagcagctggaacctgggcccgaagctggttcagatatggaattccctttaagagcaaaaataacaattactaatataatacaagcccaatacaaagtgaatagttaaaaggagaaaagatatcactatgaattcaaattttaagttaacatatatcccaactaccacaaaatattataaatcataacattttattaactgcccaacccaattttataatacattttcccctatgcttggctaaatattctttgattgtctctttaaatgacactgaaattgtaatattttctatgtagagattgggaagatactttaaacttttcttcaggattgttgatttttaaaaaattattaatagttagaaaagttttgtaatgtcatatacattcttaacattgttatcaaattttgagaaatatttaaatttttttttcatgtaggagcgtaagatttcagggcattcgatgtggtgtgtgtgtttgtgggtgtgtatgttgactaatcttacatacttgtattcttttaccagtttgtcatcgaagtgtcactgcatttgtcatgagatttagatcctctctgtcaatgtcaacattttatatcaaatcagaaaaaaattaaaaattgtttcaatgtgtgttagtttgattaactccttttcattaatttacttgtcaagcaacccaagggccaattcatcatatctatttgaaatttatctctttctcttattgaattaccacttttgagatgatctggaaaaaaattgttacaatgtactgtctgatatctgaataatttctattgatttaaccacttggctttactgcattttcttcatactccaataattgtatttgaaattttcttattcatttatatttttagtcctttaatctaaaaaaattaaggataaaaaagcatccttcacgtatattgaaatcaggagtcagtaatttttcacttgtttaaacattcaaaacatctttctaactcacttcttgatattgggataattttaattttacttttgcaaattttgccaaagcatctggctaaataaacacacttgccagggcaccgccccagagcctcggcaggtacttatgcaagcagagagccctgcagctttggcttttatcatcttcaccataaacccatctctgattctcccctttccctacagcactttccactaacaatacacatacacacccatatcacacctatactatttatttttctttatgccccttttctgtagtatttatatccatagcaattatcaccatctaacacactacatattttgcttatttatttatttattgtttatctctccacactagaatttaagctttgtaaaggcagatgtgttcctttcctgaggctgccatataaatgaccacaaatgggtggctcgaaacagcagaaatttattctctctgagttgcagagagaattctgcatctcagaatacagttcaaaatcaaggtgctgtagggctggttccctctggaggctctgggggatgattgcttgcatgcctttcatagccgccagtggctgcttccaacccttggcactccttggcatggggcttcatgaggttcaatctctgcctgtgtcctctcgtggccttttttttttttttaatctgggtctctgtgtcttctctttttctgatcttaaacataatttcttgaggaaatcataaatcattggacttgtagctcaccctaatacatggtgatcttatctcaaaatctttaccttaattacatctgcaaagatcctttttacaagtaagtttacattcttattccgggtgaacttatcttttgtggaccacagttcaactcactacagaagttacaatttttctgttatgctcactgatgtgtctccagcacatagaccagagcctggaatgtagtaagtgctaaataaatatttgttgaaggaatgcattgagagcctatagtgccagatgctgaggtaggtacttagagcactgcaatttaaatattccctaactataatttatcttctcttttcaattcacatataaatatttttttaattttttaaattttttattttagattcaggtggtacatgtgcaggtttgttacatggatatattgcatgatgctgaggttcgagtttctattgatcttgtcactaagataatgaacatagtacccaattggaagtttttcagcccttgcctcctctctccctcccctctttttgagttccttgtgtcactgttcccatcgttatgtatgtgtgtatgcaaattttagcttccacttataagtgaaaacatgcaacatttggtttgctgtttctgcattcattcattcattcattcaatggcttatggctgcatccatgttgcttcaaaggatgtgattttgttttttcttgtggctgtgtagtattccacagtgtatatgtaccatattttctttatccaatccaccgttgatgggcacctaggttgcttccatgtctttgctattgtaaatagtgctgtgataaacatacatacaagtgcaggcatctctttggtaggatggtttattttcctttggtattatacccagtaatgggattgctgggtcaaaatggtaggtctaattttagttcttttggaaatctccaaactgttttccacagggtctgaactaattttcatttctgcaaacagtgtacaaccattcccttttctctaccgtctcgccaacatccgttatttttttacttttcaatatagtagccattctgactggtgtgagatggtatctccttgtggttttgatttgcatttctctgatgattagtgatattgagtatattttcatgtttattggttgcttgtatgtcttcttttgaaaagtgtctgttcatgaccttttcccacattttaatggggttatttggtttttttcttattgatttgtataagtttcttatggattctggatattaggcttttgttgaatgcatagtttgcaaatattttctcccattctgtaggttgtctgtttacttggttgatagtttcttttgctgttcagaagctcttcagtttaattagatcctaattttcaatttttgtttttgtatgcaattgcttttggggacttagtcataaaatctttgcctaggccagtgtccagaagagtattttctaggttttattctaggatttttatagtttgaggtctcccatttaagtctttaatccatcctgagttaagaggtaggggtccagtttcattcttctgcatgtggttagccagttttctcagcactgtttattgaataaggagtcccttcccccctgcttatttttgttgacattgtcaaagatcagatggctgtaggcgtgcagctttattttggggttctctattctgtttcattggtctatgtgtctatttttgtaccagtatcattctgttttggttactgtagttttgcagtataatttgaagtcaggtgatgcctctggctttgttctttttctttaggattgctttggctattctgctctatttttggctccattttacattttagaataggtttttctaattctgtgaaaaataacattgataacttcatagaaatactgttgaatctgtacattgctttgggcagtatggacattttagtgatattagtcattcaaagctatgagcatgaaatgtttttccatttgtttatgttgtctatcatgtgtcatttatttcagtagtgttttgtagttctccttgtagagatctttcaccttcttgatagtcctaggtatttgtgtgtgtgtgtgtgtgcacctgcgtgtgtgtgtgtctattgttaagtgagattgtgttcttgatgtaggtctcagtttgaatgtcactggtatatagaaatgctactgattttcgtacattcattttgtatcctgaaactttactgaagtcattatcaggtctaggagccttttggtggagacattaggtttgtctaggtaaaggatcacatcgtcagcaaagagaaataattttacttcctcttttcctatttgggtgccttcatttctttcttttgcctgatcgctctgactaggacttccgttactatgttgaataggaatggtaggaatgggcatccttgtcttgttcccattcttaaggggaatgtttccagcgtttgcctgttcagcatgatgttggcttggggtttttcatagatgactcttattattttgggatatattcctttgatgcctagtttgctgagggtttttatcatgaagggatgttggattttgtccaatgctttttctgtatctattaagatgataatatggtttttgtttataattctgcttatcaattcactataagttctttgaagatgaaaactctgtcttttatggtgtttgtacattttgaatttcttaatactgtgtatgtagctgacaacacataaatagatatgcaaatgagtaagagagtcatttgggatcactgctgatttaacttatcttgccatgaaagcattctgttcctctttcccatgcttggtaatatatccttttggaagaaacactcttgccaaaagagaatggcattattacatccaagggaaatattatttgcccaagagtgtaaaaatgtatgaaagaaatatgtaaataaaatcctatatgtaaaatctaataatatcaaagtttaatgatgaaatttgtcaagatgattataaaatatcacagttaaactgtatattatattcatgtttcttgccatttgtatgctaaaaacttataatgatttgaatgtacaaaatcaaaaatcgggagaaaagaagatagatcagagcctattaccaataatttatcctttacctccataaatgtttgctagaaatgccaaaggctctaatttgtctatttaaatgtacttcaaaaaagcattccccaagttgcctatttactctgttatctctataaatcaggaaactctccaggctttccactgtgaatgttgtatggaattgatagaacaatttcttttttatgttgtactcattcaccatttagttacttagacaataaacttagaatgacaaattctaagtctcaaaatatgaatgaaaattcactcattttcagaacaaaatttagcatcacactctcttgagcaaaatctcactagaaaaaaagatagagaaaatacgttatagcatttgaagtctgctacctcatgtccttttatctgctttctaatttattagaaataaatatgcaattaaaatatgactttccttaacctttacataattataattattatgaaaaatatgtgtaaaaatatacatgttatattccttttctctatactaccaacagccactcccattcatgtactcatattagaagggaagagctttgaatatcatatataacattttcagataaaagaacttaggtccagaaaagctaactcttttgctggtgactaaacatacacatacgtgcactgacacacacatattaagttactgagttgatagcaaaaaaaaaaagtgcaactttatatggaagtagaattatgtaaaaatgtctgtctaattctatactggaaaatatctcatatgaaatggctccttcatatgacaacactcagtattcaaaagcaaagcacaacaactaagaaagttactttccccaaccaaaaaaaataataataattaaaaaaagaaatgtacctattgtggactagctgattggataccatggccacagccctgattttcagtaaagacatagtttcaagaatgtcattcagatggtttcttaagtagggatgttgttatttttagcaaaagaagccttttgtccttgtcacatcaaaacacaaagaattccataagtcagtgccagtcttgtttttaatgcctaaatatctggccacatatatatttatgttatgtaaatgttattgccttgtttttcagaataagaatttagaacattagaaattgacttttataatgcaatttttttcaaactctttttggcttttctctaaatctcaaaatttgtttcaatttaggcaatggaattggactagtcagtctaatttatttttgttagccagtttcacctctcagattccagggaacaaagccaaactataagatatctactgaaaacatttgtaagaaataattaaaagcagactctgaataagcatataaaatgaagcatttttatcacaagctttataaattttttaaaaactgtgttcatttaattctgaaagcatgcctcttttgtaattatgaaatacagaaatatttgaaattccccagtcatcttggctcacaaatagaaacatttggttgcgtttggttcacaagcacacaggggcctgctgcttttggttctgtgtaaagcccatactatttcttgctttttttttccacaatgagtatgtgggtgctagaatgttatcgaaatattttgcaagacatgaatctaaaatgagcactctgctatggttgcagttacagtgcaaaccccatcaagttgctagcattggactgatagacaaggtaggggcagccagagagtctgagttcctgtgaggaactgcaagggggaaggggctgtgttcaggggctgtcctgcaggctgaaggttgttattagttgtgtggtttctgggcccacacaaaactccaccttctcccattagaagtcagtgtcctgttgatgtgaccacctgctttattattcggggttttctgccatctaagacctgggccactcacctggatttttgaactcttgcttttgcactgatacctgattcagaatccgatcaattgcctttccatctttgtctgtggggaccagaagtacagaggtcttataggtgagcttttattctttcttccagaaagagtatcctataactgtgtcagtgaggaagtgaaacacaacctcctgtttgaaacacaaaaggaatttagagaggagtaaaatacagggccgtttaattattccctttaataagaagcagcatccccaccaaagaacatgtcgatcttacttggtgatacatttccctatggagaagggagatctgattgaaagaagaccgaagggcaggagggagggagggttgtaaagcaaggatgtggctctgtgtaaccgggataaaagcaccctgccttagggagatgttgtgagaaataccccagcaccctcctgctacaagaggcaatccttatagctggctcttgccatggttaaaatgattgggacaaaaatattaaaaaagaaaatgctcctcgctatactggttggaatcctcaggcttggagtaggaggagctgagtaatccctgcagtgtcccgaaagctggaatcctgagtagattcaggccaatttgtgtgatattcccagggattccctccctattttgggcagaggaatggatttggatggggcagcatgttcctgtgagttggcaggcacccactgaacagaataactgatttggtacccagactgcagataccagctgaattgccaagcagatattgcctgagggaaatacctgctaaagttgaaatgatcactacttggatgggttaaacatttaccagtatcaactagtattatacatagtgttttagtttttctgaaaatgtgcatgcacatgagaagaataagtattaagatgaaactcccagtccctctccagaggcacaaccatggttaccaatttcttatataaagtatatatataaaagcttatataacctcttcttttacttattaaatacttgcattgattactttagaatgggcaagtaaaaactagtttaattgtaataattgtaatcactctaatacattttcttattcctgaatatttgctttgttttaaactttagcaattatgaaccttatactagtctaggaaaattaatctgtaaatatttctgttggaatctcagatttataattaaaaaattatatagggtatgttacataatttctgatcaaagatttagattaaacaaatatgtttgtgcacttattacatcgtcagcactgtcctgtgcctcactcaatacgtgaacttatttaatgtaagtccacttaatttcactgtagaaaccaaggagaaaaaggtctggggcacatacatggcattcttgtgaatctttctgaaagtgctctcttacctgacatggtagggatatcctgaaaggtaagaagggaaaccttcagggcagtgccatttgcagctaggtctttgagaataagaatgaattcttattcaatatgctggtgccacagttagggctaaagtatctttagacctgccatctctaataataacggccatttctgacttgttaatcttcccggcttttttccctacaattttaggtctaaatcttccatgtaaacacactctttcatgctgaatcctgctcaaataactgccaagatgtttgtttagtaatcctgaaatagaagattggcttctatgctaagataattattgggagaatctcttcttttaataaatacctggttcttctcaaacccatgccaagaagaattcttataatatcatttcttctcaaacccatgccaagaataattgtcaccatatcatttcttgctattcatcccttttaaaactaagaaacaggccaggtgtggtggctcatgcctgtaatcccagcattttgggagaccgaggccggtggatcacctgaggtcaggagttcaagaccagcctggccaacatggtgaaacccgtctctcctaaaatacaaaaattagccgggcatggtggcgcatgcctgtagtcccagctacttgggaggctgaggcaggagagttgtttgaacctgggaggcagaggttgcagtgagctgagatcgtgccatcgcactccagcctgggcaacaagagcaaaactctgtctcaaaaacaaaacaaaacaaaaaaactaggaaacattaaagcttccaaggaattgagcgttaagtggggtctaacatttaatatgactgtagagtaactcctctttactaagtctttttactagtttctccctttctctcaaatatgtacagtttaaattggatgggtaaagcaaatgggagagtattgctactttttagtcatatttatacaaatgaattatataatattaattgttcataatattccttgtaatttatagcactgtgagcagtataaataatttgataagcgctgggcctgcccagcctttgtaatgtcttgtcaagagtagattgagaactgtgacatgatgttaggaaatggagatttacaagcttactgaagaatataactgaggcattaggagtgcttttctgatcggattaatgttcagttttattttcaattttatcaagtgagtgttaatgagaaatttagttggctccagtaaaatcattatttttttcctatgaaacatatgaaacctaaaataatagtctaattgtttcatttttatggcttcgaaattctagacaaaaaaaaaattctagacaatgtaaatatttaaccagtaaatattttgatgcattaaatcgcaaaatatcttttataattgctgcatctctcttccaaataactagaacccaattcccattttcacttttctcacataaacatgaaaccatttcttatagtctgtaaacatttctacataagtggctagaacatatactgccttatgtttaattgcatgagacccgaacttatttagtgagtattttgaaaagcagttaaagaaaaaagatgatgaaacattaatggctcccttcctccaagtagaagataagagtaatatacggtcatggagttcctttttaaggggatgtattagttttctatttctgcatataaagtcaccccaaagctttgtggcttaaaacaataatattttattctctcatggtttctgtgagtcaagaaattgaacaaggtagggtagagatagctggtctcttgttatgtaatgtctaaggccttagctggaagactctaaaggttgagggctgaaatcatctgaaaagttgttcatgtctggtggttgatgctggctgtgggctagagacttcagttcatctccatgagttctctccttgagggttagtttgaacttcctcatagcataatagctgatatccaagggcaagcatccccagagagagtaagaacctgttagaatctgtgtcctttttatgctttggcttggaaaccacagagcatcacttcaaccacacttcatgggttggatcaacaacaagtatccttcaatattcaaaggaaaagaacgtaaatccaactcatagattctaccagtcacaacgtaaagtaacataagaagatctgtatattaatctttggaaaatataatatgctatgggaggagtggacacaggtttagctaatgccaggttagggttttattaagtgggacatgaaagcttagagcttgaagtgacgagaaagagggagcagggttggatggggtgagaattttacggactgtggatataaaggggctgcattagtcagttttcacactgctataaagacatacctgagactgggtaatttataaagaaaagagggttaattgacacagttccacagaccttgggaggcctcaggaaacttacaatcatggaggaaggggaagaggcatgtcttacatggtggcaggtgagaggaaaaagagtgaagagtgaagggggaagagccccttagaaaactatcagatctctttagaattcactcactatcacaagagccggatgggggaaactgcccccatgatccagttacttctacctggtctttcccttgacatgaaggggttatggggattataatttaagatgagatttgggtaggggcacaaagcctaatcatatcagggacagagaaaggagaagtgaggaggctgacattatgagatggattttgagggaataacagagatgtttaacggggatatttatgcagctttgctgtgtggaatgtgaggtaaaattgtttctctatatttttataatctttagaggaaacatcccactgggttgtagagttggatctatttttggacaaaatacattaagttgctgaatatggcttctatgtagagggagggaaaaagtagaggcctactaaatctaggttacatctgttacatctgctttcagaaaaacttagtaataaatgtggctgtcatgttaacgtttggtggttcctaaatgtcattgcaaagactgaagccagtccatggtaaaattttcattggcaagctctgaaatcagaaattagacatcatgaatctttcacaaagctaaatttgttcaattaaatgaaatgatctttattgtgagtttatatccttccaaactttttagttttaaaatgatcttttttaagaggaaatgatggtgacagtagatagtacttgtgttttggatttttaactgtccatatttggaaaagtaaaaagttactgaccaccatactttagtttctaaaacactggagtgcaatctctaaattgcaatgtgtttggggaaaaaaattcaatccctttgcattaggtatttttattgacattagatataagagaatagtataaatttacctaaatacacagaaaaataatctttactctttataatcccaaagaaatattccttagttcttttttcttctatttactatcaatatctatcacaaaagctgatattacatgaaaatattaatataaatgttacaacattatctttcttacgcaggtttgttgtgaggattaaataaattaatatttatgaagaactttgaatcatgcctagcatgtagtatggactcaaatattgctaataatattgacaattttttttgaaattgctcttcttctgtaacactcaatttatgccattggcataaatgttttgagctagacaagatattgctctattcagagttgccctggaataacttgtttctttaatcataactggtacttttttaacctatttaagctttaaattatccagaaataaaacgaggaaaaaagaagaaattaaaaacagtaataaaaccaatttctcagaaagccaaaagataacaacaaaataaactttaactacaaaagtctttttagagaagaaatattcttatccacctcatagcctagactcagtcaagggaaagggcagccaagaatatcttaagtgatatcctgggctttgttttcttgattcaagtagtgttcacattattataattatatattcttttatctgtatatctgtctattcatccatttattcatttgacaaaaattgagtatctgtgtttgagagacacaaagataaataagatatccacatccctccaggaaaatgtagcatctattttataatacttatgaatattactgaagatctaattataaaataaattaaatcatttatcaaatataaattctattaatatgagtttatatgaccacctataatgataacaagtatgagttccctcttttacttttatctggccttccctcaaaagatagagctaactacctagctactgggctgaaaatactgagttattagcctttgtgcatagtaagctggtggtcttagatcagaggtatatggcttttttccaaagacactgtgagatacgcagaacaaaaatcagaaaactataatcttttaaatgaatcatgaagtaccaaaaatgtaaagatctcttaataaaaataacatttaggatagataccatcagaccagttctgtactctgcctatactattttgaaaatcttccttaaagaagctttaactctgatgtttgaagtggctcatacaatgaaaataggtttaaatgcttattaatcacatgtaaattaaacacataacttttgtgttataatcataaagtggatttgctttgtttcatgtttcttcttaaaataatataaagcaaataaatgaaacaaaaatggaggtgtcctctgctaggtctacagttatataaggaaaaccggaaagataacataaaaatctccctaaatcaggtctatacagaaacagatttgctggatttagagagtagataatgcatgtaatctcaaatataaaatatagcaggtgactttttatggggaagttttttcttaatgttgatagtaacatatctgtacttgacattaattaatccatatcgtaaagatttgaaccagagaatcaggcccacttggtcatagaggcagtcaaggaatgggctctccactacaatttgatgtgaattgtctacttatcatgtctcatagttaaaccagatagtttggtagattctttatcacgtgtgtttctaatacaaccaggaaaacctatcgtatattctttttttttttttttttttttgtgagacggagtcttgctttgtcgcccaggctggagtgcggtggcacgatctcggcttactgcaagctccgcctcccaggttcacgccattctcctgtctcaacctcctgagtagctgggaatacaggcttccgccaccatgcccggctaattatttttgtatttttagtagcgacggggtttcaccgtgatagccaggatggtctcgatttcctgacctcgtgatccacccgccttggcctcccaaagtgctgggattacaggcatgagccaccgcgcccagcctatcatatattcttacattctctctcacacaaatgtgcatgcgcacacacacacatgcacacatatacatcattctgacactgccttaactttcagaatacaaggttgagtcctctgccacatactagcagtataatcctggatgagttacttaaacttactttgcttcagtttgaggatgaaatgagagaatatgtgtaagacatctggcacacatagtgagcattcaataaatgttaactataagtaggtgaccagttggggcccaaggagattgtaacttgcttaaggtcattaaggtagttcgtggctaagtcagaattagaatctacataatgattctcaattcaacctcctttatactaagttatctcactaattggcagctctttcctgtgttaactttctgtacatgaagggtttgccttcccaagtaagttgtaagcatctcaaaggttaaaagcattgtgagtgatatcttcatcaaccataggttctaatagagacttcttgctatttgtaggggttcagcatttatttgttaattatgagctttcaacttcacaatagttaacctgaaattgttttattcatcccatttttctcattctgtcttcagtagttctgtatataagaacagcaagccattatcattctcagcataaaattagaattgcactctgcacaactaccatcctctccctctgtaagtcctcagagaaaatcatacaattttctactatatttctgcagtatgaagaaaataatttaatatacctatgctttggtttctccatatacagaacttatatatggcattactcaatcaccaaagaattccattataatttagcttattgttatgtaaattcaggcataacccaggccacaatatgatcccaagaatataacaagtatccatagggaaaacctggtagaataactcaagagtgggaattatttttagctttggatgacttttatataaaggagctccactcacaatacattagtggcactattaactacactcgctagtaagctaatatttgaggtccattttttacatctctttgagagtatatcagtatatcaagcattacaaattactaccttgattgcctttggagctactctttttttgagacagagtcttgctctgtcacccaggctggagtgcagtggcaccatctcagctcactgcaacctccacctcttgggttcaagtgattctcctgcctcagcctcctgagtagctgggattataggcgtgcaccaccatgctcagctaatttttgtatttttagtagagacagggtgtcactatgttggtcaggctgttcttgaacttctgaccttgtgatccacctgcctcggcctcccaaagtgctgggattacaggcatgggccaccgtgcctggcccttaagagccaacctagcatatccttgtaaatcagttgcctaaacaagcttcctcttaaatatgcctttgaaaaatataaattcctctctatcagtatctacatttcactttgaagatcttatcggctttcagcagcaggtgtgcatatcctacaagtttcagttttctcttgatgctcaggatgaactaaacatctagacaagggagcatctgggaagtctgactaactggactacttggactggtttgtcctcacaaaatgtaagacttacaatctgtaggctgttacctagctcctgagagctacctcccccgggccgcccacactagatttttagtcctgagctgcatacccaggaattctcctgtttccgtgaatcaggaaggatatggcaagttaagagagaaggaaagaacctgctgagccttgccttccaagggatatcaggaagttactcaaaagacggcaaagtgctctctacacaaaagtgctggaagaactgcagttatattccctttaggaaaggaaactttaagatgatttggaaatagccaaatgtaatcacataacaaccaattttgaagtttgctggcatgcaacactcctttaggaattcttggtttccagcttggtctcattggcaacaaatagaatttcctaagccttattaggagcctgacattttgtttgagaatcaaaacttttctgtttgaaaactagagccaaactcagttatataaaaacagggatgtaagagaaagagcaaacaaggaaagctattatgttatatgtgtgcagaacataatagtttgaagagggagacttctcgatggaccagaataaatactagaatgtaatacacaactcggttatacaaggtaaaaatgagttactggcccttcaggatgggtatcatgatagctcattaatttaaataactcctaatatgcgtgtagcagtttatcagttagagagtgctttacatgggttgcttttcacaatagataacttagggcaagtgaaggcctgggtctgaaaacatattctgcaaaataagcccctcactgttaaaacctggcaaatgctaaggactccacagctagagcaaatggcttctatagttgaataatctttcaataaagttagaaaaatgggtgtccttcttcaatgcatagcatgttgggaacccaggatactttagaaagtctcttggtccagcactccgacttgtgaaagacaaatattgtcatacaatgctttggctgatctcttatttcttgtcaacctaaggtacagtgggtattaaactcttttagcttcctgaagacaaactaattcccgacctccctgtaataattgctgaacatgggaagttttggggtctgagttttaattccaagtaattcattatgtctgtcattgtctgtggtaggttgcttgcccaccactttgccagtatcattatctgtgacttgaggcaaatggtaaggacagcttgtctgagtctcagcacttgggtggcagatgtgacagagatagataaattggccagagtgagtattttaaaccagaatactgcccccaagcccagtatgggaccatctacagtatggaaggcagctcagacataggtcagtttgttcaggagaccacacattatgatctgttgagctgttcatcattttcacttgaaaatgaggggtggctgtttttaggctgtcagcctcagatttgaattctatagtgattaggtggtgaaatggctgctctctgcagactgctcaggggctgttagagctacacaattgccctaaaatcaacaggagcaaatagcctcaccaaaccagccttgagtcattcctttaagtgagggtgattaggagggtcagctatttttaagaaagaaattcaataatcagtctgtccagagactcaaaattatttatcatggcattttccaatgtcacctttcctcaccatcactttgttggcattaggctttgagacatggttctcaccagcaagatggttatttttatgtcttatcaaggtctctaacaggtcctatgacacgcaaatgttagaaaggagaataaagcaacaattgagtaaagcaatagtacagtgggaagagagacaggaagatgatgttgccatgttttagtttaatataaattgttaatatctttgtctcagtcactgtatagaaataaaatattttcagattaaaagatcctagatcttcattgaatcctacctctcttaacctcagcccttttggaaaacagcacaaactccaaactgtaattcaagctctaaaataaaaggctgggctggatccaaagtgttttcaatatttttctggtagatttttactggtttttcatgaaaagcacttaattcaaatattattcttccatcttttaatgttttagtcaacagtaaatgatactctcttctgatatactcctctcaaagtggtagaagagtttgtggcaaattgccatttcaaccatttattctgctccaataatgcagtattgaatacactgaagcacggaaaaattaactaaactacttttatgcactttcaaaagaagcaacagaaaaacttggcaaagtaataatagtgaaattttattgcttctcaatagattaatatacttaataatatcctagaaaatgctgcactttgaaattttaacatgtaacagtgtatatcttaaattaaaaataactgtatagtccagggtggttatttatactttatatagtctatattctttgtgagatttgggtttaaacacatcagagtttaaattctgcgaagactgcagagtaaagaagattaagatggagggaaggaggaagagcaggaagagggaaagtaggtatagaggaagaagagaaaaggagatagtagaaaggggaaaggaagatggcagggaggaaggagaaatacctcaagtccatgaggggttagtgctgaaggataccttcatcattaagtaaagggtgaattgcactgggttgtttaaaagcatgcccagatactgctgggtgcggtggctcacgcctgtaatcccagcactttgggaggccaaggtgggcagatcatgaggtcaggagatcgagaccattgtggctaacacggtgaaaccctgtctctactaaaaatacaaaaaattagccgggcgtggtggtgggggcgtgtaatcccagctactcgggaggtgaggcaggagaatggcgtcaaccccggaggcggagcttgcagttagccgagatggcgccactgcactacagactgggcgacagagcgagactccgtctcaaaacaacaaacaaacaaacgaacaaaaacaaaaaaaaagcatgcccagatacaatcctaaagtatgcccagatacaatcctaatgcaaaattttatcagatggaaaagtatcaaaagctggaataaatagaaaaaggagttcatgaaatgtattcaaagaaattttaaaaatagctcaggtacagaatctgttaaagcaacaaagcagacacatgactcttcttaatcttccacacttgactccacggcattaagttaacacttccttagtctcctctgagttgagacaaatttcctgaaaggaaggttgacattccctggacactttaaggatctgtttgtgcctcatgggtataggttgtaaaagttctttgcatagatatgtcagcattttagtgcattgtttggctccaagtgacctttcctccctgcatttcctcatttgccattcatcttcttgcttcccttcgtctgccataatagtccctggggtatagtataagtgcttctagggcactcctctaactgcacggttattgttactgcacaattaaaggacttagatattgaaaaatggtagtgtttggaattctgcaatctcattccttaggggcagggaacaattggaacacctaaaaaagggtcagagtccagaaccagattcaggagagagttcagctttcaattgggttggtccatttttcagtgctgcccgcacgagctgtcagttgctggaactgcagagtatttcaaggaaaggcgcggctaagcagaggtgaaatctttagacagatgagtctcaaagaggaaattatgcagaagccaaatggctacaaatggtactgaggattgaaacctaaactataagtgaaggtctcttccctaaatgatacactcagacttaacaataagctaataaggtggttcaataaagaaaatgtgggtctgatggaagagtagagagtttagaaggtgagtaagagatatctatgatattagcttgggtgtgtttttggtattgatgccattgtgttgggagtacagcagaaggacaaagaactcctttagcaacttggcctgcagtcaaataggccaacattggaatctgagctccactgccttcttcacctgggactaatcacttaccctctcagtctcctcatctgtaaaaaaaaaaggataataataataataattgttacctttggaaaattacacctttctcttctgtacctttaacctttctctcaactagatactttccatgagactcaaaatacattcaagtgtcttctgcattaaaaacaaacaaaacaaaaacctcaccttcaaccacttatttccctatgttagggtttctcttgacgtttggggctagataattctttactttggggctgttctgtgcgttttgggatatttagcagcattctttacccatgaaaatattgtgtccctcgccccacaagttgtggcaatcaaagttgtctctagacattgccaaatatctcctggaaagatgcccaccccccaccccagttaggaaccactattctaatgactgcctcatctcttgtctcccttgcaaagccacacttgcccagttttgcctattctctctagctatattcctcacttccctatcacagccgatcctattctagtctgtctcttgttcccattttaccaataaaatcatttttagtaagaagaacaataacctggatagttctaaatgtaatgaatattgcaattcttctcttccttgatttctcacaatttgaagtgtgttcttctcctggctcctctgacactattctctctcggcttgatctgtgaagcctgggtctcctggaatagctgcagcctttctctccactttcttaccatattctctcactgtgtccaggacactagctcagactttttcaaatgctgattaaagggcttccatgctgacagagggcaaacctcacagagcaagcttttcttaagcttttgcttatatcacatttgctagcactctcttggccaatgcccagagtcacatgggaagagcctactgaaggcagaaatacagagagagaagacttttggcataacatcttgagggcttcctttaacccactccccagtaaaactagtgaaaactatgatcaaacaaataaaaactccaagcacttaaatcctctggaaatgatcctaaggacaaatagcaaatgaagaaacatctattcaagaacatttatgaaaattcaataagaaaggcaagcctgtggtatttaaaccaagactgctccctctcacccccttccaagttcagggagatggagcttccattccaggctggtgcaatcaagaacacagagctctctcccctccagctggaaggtttcttcctggaaggaacagaacttcagtgtttctcatcctggccatagttacccattgctaaggctaagctctggtgaatacagtagagaggtaggggcttcctcccctgccaaatcccccatcattgaatggaggggataccttaggcactgcatgctaagaatacagaggcctcatcatccttgcctggcctcctgaggtgggggttccacaccaggagagataaatatagaagatattagagtgctgccacctcccaactaagctaagctcctagagtgggagtttcatgcagtcatgcaggaagaacctctccattttctccacctccatcttgagaaacatggcttagagattttgcctggtggtggcgggggcaataatccatcataaaataaatattcttaatctcttcccaaagggcatggcttcatttgcaacaaagtatggaaaagttcaagccttagagtgcgctcaagaacagtggaagctatggtgaaaggcaattgggaggagagtcaagatacaggctaaattgcagactagtttgcaggagagaaccagagaaataacacagctgggaggagccctgacttcgaactatttcttcaaaggagacacaattcgattgtattagtgtgttgaacaatataaggttgtaaagcactgttgaaaataacacagcaattgttcaccaattagtggagttgaacagctgaatgtggttaaggaaagagtgaaggacaatcacacgaacatcactctcatgccggctgggctgtctgtggacatacccaaagatgtacctccctgatagcaaactcagtgacttaactgagggaaattaactcacctgactgtgaaggaaatatacttattaaaataatccagcccctcactaaacaaccaaagaataatagcaagccctgggtggtggtagggggagtaagaagagttgctacagtatattatctgcaatatccactttccaaccaaagatcacaaagcatggaaagaaacaaaaaatataacccatacacaggataaaagaaccagatggcagaaactatgggtgagagggacccagatgttggatttaatagagagatggagaggagaatgaatgcagccagtgtgcaatgtgtcatgtcctctaaatgttcaagtccctcaagtcatagatccacctattttttctcaagttaatatctctacacctagttttaattccctgtcatgtatacaggactcacacattttatcttcaacttaggccttccctctgagctccggacctgtgtatcattcagcctttttgaaatctctatccatatgtctcaaaggcacttttgattaaatactaccaaaaattaactccctctatctcccagtgttctctatttcagtgaatgataccatcaaacatctactttcaaaatcaaaactctgagataaatctctaacagctccctgcttatcaccccaccccatcatattgaaaaccaaacccatttaaatacctttcgtttgtgtcctcctctctctacctccaccaccagtactgtagtgtaatctgccatcatctctcacatggattactgcacaagtctcctatctggtgcccaaattaggagcaccctcctaactggtatccaatctaatctctacactgtagccagaaaaaatcctttgaaattcaaatctaatcatggtatgtgcctcccccttcttctatggagaccataggaaagaaaccgaaactcctgtggtgcttgagttgatgctagtaacctctaaacctcatttcatgcctggatctgtcacttcctgaagctccatgataaagcacagcctcctcaccctccaagtgcgggggttctctagttgtctcttccaggtgccaccagagggacttctctcataaaaggcctgtgcaccctatgctctttctctctctgttatggacttccttccagagagctggtccccattccttgatatgggactgtccacttgtatgagtaataaaaatccttctctgatcataccaaagaattggtgtcatgagtttttatattagaagctaaacttgagagggaacttccccatgtcacagtgaaggtgtgatgataccctctttctaccatctttaaattcttccgtcgcttccattccattttctcttaggataaagttcacaatccttaggttggcctacaaggtcctctacagttaggtacccccgtctgctttccttccttccttcacattagttatgctccccactgcctgaaaacatgcagacctgctgcatcctctacctgaaatactcttctcctcacccctgccagactttacctaatttgcccttcgtttgtctttgtaacaccgctcagaaatctcttcctcagaaaggccttctctgacacctcagcacagtcctcctcacgaggtcagatgtattttttcttcaaggcactgactttggtttaaaatttgtatttattcatgtaattatttggagtgcatttatcttcctcactagatataatcaccattagctcaagggctttatatgttttgcttgccattgtgtcctcagtgcctaggccattcactgacccacagtaggtgctctgataaatatttgttgagtgtagaataaatgaagacccttagaagcataaaatatataatctcaaagcagaagatactttagttagaataagttaggttcaactatattaacactccttactacacacacacatagctacactcatcaattttggtggcttacaccaaaaaggcttatttcttgtgcacactgcattcttgtgctttaacaggatactccgccctacctcatctttattacagaccttggctgacggaggctaccacttggaatattgtctattttcaaagtccagcagaagagaagttaagaagggtttcactctggcaattaaatattccagctaggaaatgacatactttatcttcatatacaatccattggccataactagtctcatggtcctgcccatttgtaaaggggaaataggtaatcatctcatgcattgaggaggaaagaagaattagatacatgtgaccagtagaagtctccttactgacattttaatgtagagctgtatgtgattaaagttaaaattgaatctgaagggctgacagaaaaattcaagaggatatgatatttaataattgaacgaggctgaaagatgaaatttggacagattgaatgggtaggccttgctagcaggaaagacaaaataaacataatcaagaagtatgtatgaacgtgtgcccagggcagtgaggagtgatcagcctccttgaagtggaggatgtgtgtcaaggaaccagaggagatgattagagtggcagacctgattattagcatatccatgcttctgtctgaagcctttttggcctataatgtagaaatatccttggagtaagcagttcagcatatggttttagacatataggtcatcttggctggattgcatattcttcatttttaaaattccaggctgtattggttgatatgcagtccagaaagagctggatctgacttaagaaaataaaaactgctttaatccctcttttcagcccattgtctatccattagcaggtaaacaccagtgtccctgcaagtgtgtgaactgagcttccttaatttcacctttaattggcacttctagtgacttaactgagtgaagagacccttagcaatgatacaaagtgaaggatggtatagaataataggttttctgaaaacctgaatgcaattgaagggtgctatttaataaatctgtccctagaagctaatagcacgtagtcaatacaatttagcctattttctcccatgttacatttgttagttgtactggttttggaaaaggaaaagtcatgctgttacagttccactaatagaaaacagataatttgggaggaaattagattggaataaaagcacgttgttaaacaagaaatcacaataaagtattgagtagagagaaaccgttaatggagacagctatgtcatacctaatatgccctcttttcattgatccttagaggaagcataagatcgcagctaagtatggtctcttgagccagcctgccatgattcaaattgaaactccatcattcaccactgtgtgaccttgagaaagttatgtaatcattcttggatagtgattcttactgctatggacagatttgtgttccccccaaattcaaatgttgaggcaactgtgtgaggagagagggcctttaggaggtaaagttaaatgaagtcataaatgtagggtcttaattcaataggattagtggccttataagaaggggaagagttttctctttttctttctctacttgcctgcaccagggaaagtccttgtgaggacacagtgagaaggtagctatctgcaaactggaaaagagtcttcaccagaacctgaccatgctgacacacagatctcagacttgcagcctctagaactgtgagaaaataaatgttgtttaactacccattctatggtattttgttatgacaacctaagctgactaatacactcacctataaagcagggataataacagtgcctatatgatagtgtgtttacaaggatttaatatatgttagtttatattattttatgtccatatatgttagcgtatatattattttatgtctatctctaattcctcattgaggatacttaagaattctactttccatgtttgacagacctggtttggatttcagttccacctcttgtaaactctattaccttgagccagtgactaatgtatctaagcctccattttcctatctgtaaatggggatgataactagtgctgcttgtctcttcaggttgttgtgaggattaaaggagatatgcatgacaattcatctgccaggtagtaagcattccaaatatgctatttactgccatcattagaggtttgctgagcttcctcttttgcattaagtaagagactattctctccagaaaactttgaactacatgatggaggaacaaataatagcagtttctcctcaaccttggaactctaaaaatgttttttctaagccattcttatctttattttgtcattaaaagatacatgcattgtgcattttgcttttatttaatatatgccatgagtgtctttctccctatcatgatgtcaatgttacattacagattctaaggagcaggggccatatcccttaaacatgatttatttaaaataacaatataggattggatgtgactactgcttttgcaatgaaactgaaagatgggagagtgagatttttctcacagctatggagtggcagacctgagcactaaaatccagtctcagaacccagttattatctcacaatgtgaaggcaggaatctatagacagattattgaacatctcatgtatcatatcatgtatatcattaagcttatatgtatgacaaaatagtattttgtgcagcagtgcttctcaaacattaataaatgaatcacctgaggatcacattaaaattcagatgctgatcagggagtctagaatgggactgaagtgctgcatttcttttctttttttttagactttaagttttagggtacatgtgcacaacatgcaggttagttacatatgtatacacgtgccacgttggtgtgctgcacccattaactcgtcatttaacattaggtatatctcctaatgctatccctcccccttccccctaccccacaacaggccccggtgtgtaatgttccccttcccgtgtccatgtgttctcattgttcaattcccacctatgagtgagaacatgcggtgtttggttttttgtccttgcgatagtttgctgagaatgatggtttacaccgttggtgggactgtaaactagttcaaccatcatggaagtcagtgtggcaattcctcagggatctagaactagaaataccatttgacccagccattctgttactgggtatatacccaaaggattataaaacatgctgctataaagacacatgcacaggtatgtttattgtggcactattcacaatagcaaagacttggaaccaacccaaatgtccaccaatgatagactggattaagaaaatgtggcacatatacaccatggaatactatgcagccataaaaaatgatgagttcatgtcctttgtagggacatggatgaagtgctgcatttctaacaagctcctaaacgatgctaaatctgctggtcctcagactactctttaagtaacaaggatatagttggttttagcaatagtgacttaaagattttttgctatttttgtttttatctacccatttttgtattcactaaaatgtgttctggatgcaaacttctttaatacaaagggaaaataaattaaaagccaactttgcaagaattgaattacacacattttaaacttaaaatgcttcggttcatttctctgtatgttgtgtattcctaaatcattcacaatgtctttattttttaccccttttttatcaaatgaggaagtagtactcctctgacttttttcagtttttatcttccataacacattaaatcacctcaaccttcctaaaaagctctccttgttttctgacttttaactgtcttgagtctccatttctcaacccctaagtcatgcccaaatcctgttctctgacattttctcatctctcttactttcttctccttgggaactcccatccactgccacatattcaaacattaaattcagctctctatacacttctgcatcagtgtctttcattccaaagtcttttctaagttttattcttctatgcccaatggattggatacttatgacctcacagccctttaaactcaacatgtcaaaaaccagaattcatatacttcttactgttaggccccaagccatctgcccacaaccaccaggttatattgttccctttatcaaaattttcagtgattatatttacggtggaataaatttttaactctttattctgacattgaaaattgtcgtctctccaacttcaatatttttttgtacctatatcttccattgcttttaaatatgtggttgacttaagtttgcctgaatcctgtttccagaatgtgcctggaaactcccaacctccatgccatttcactctgaatctaaagatctcgtaccaatctttgcttattcaaatgttgcatatcttttaaggcctacacgaaatgctacaacttttgtggtatattctctaatcccttacctgaaagtgattggtccctcctctgcactgctataatgcatattctttgctatttagaagacagcccatgctgcactatatattatagatctatgcaaatatctgccactatctgaaacttcaaggctccatctcttctccattattcctccaaacaccactcacagcaggttgttgtcagtaataaaattttattgaaagttttggggattatgcagggcaattatagcagaagcaggaatcaactggaattagagtgatagaaccacagcccttagacatgtatcagacactccctgaccaagtctgtccatggacacagaactcctcacctccagatacttcctcttgcatctcttctaccagtatcataaccctcacaaaaatgacaaaactcaatgccttttacttcgttatgcagtaatttcccctcttttgttactgtttaaactttccagcgctttgagaggccaaggtgggcggatcacctgaagtcaagagtttgagaccagcctggccaacatggtaaaaccctgtctctactaaaaatacaaaaattagccaggtatggtggccagtgcctggaggctggggcaggagaatcgtttgagcctgggaggcggaagttgcagtgagctgagatggtaccactgcactccagcctggaggatagattgagactctgtctcaaaaaaaataaaaagaaaaagaaaaccctcaccttctataatcaaataggtttttaagtgttttcctaagcttgatagcacttcagtctctcagaggaattctgcagtcctgcagttgtcttgggtcaaccagccaaaagttaactaatttgcataatggcagccccataaaatgcgcaaaattattatcttttatatgaatgcttattaatatatatatatatatatatctccttttacatctatctagaaaacgttttaagggaagaatcatatagcttcaaacatttttgttaattacaatatggaagaaaagagagttcaattccttaatctatcatgtgtgagttaggggactttaagcaagttattttcttaggaatcctgtttcctgacctatcaaatgaatgtaagaatagctacctcacataagtgtgaggacatagataatttctataaaatcatttagttagagtcttggcacatagtaggagccctgctctcagtacaagtttaaaatgtctgttgaatgctaaaagattactccattgagctttttcaaactttaaagtgagtatagtgtttcactgtaggattccaaaagctgtttgatgctatgatttctttctcaacatcatgtttactctgaagacatttccatagtgttctacccttaattgaacagagataggaaatcacgactttaaaactttcagcgttaagagtaaatgacacattagtttagagacatatcaataattatggaagtatcttctcaaactgtaatgttttcctctgccttagtgctagcaatcaaatccactgaattaatctgagcagggtcaggactttgaacctgaggaaaatcacttgaatttgaggcattaagtgtgcagtacaaggtgttccagctacaaattttctgaatcctatttcaaagcaatggtgcaggagaccagatagccacctcaaaacttctgagtcccatagtgttttggtatggctccagaagcctgttgctgccccagaaaagggagatttcaccatttctaaagggttagctgctccctggggatgacagataggtggcaaaaattggaatgtagaaattttccttatgttctaaaattgcacagaaattttctagggaaatattctttatagatttcccaattttgttgactaatctcttcatctgaaatgtttccctccatgtatgaattttctctctgtctttctaagtccagtgtagaatcgatttggtatctaccgactttccagattcctccaagttgggataaatcatcatttcctcctctgtgttcctagtgcatagaaataaaatcatttatcacaatctttggttactgatgatggtggggaggtctttacagtgtgatggcttgaagtacaaagtacaaacttgaaagtcagattaccacttactttggaccttaggcaggttacttaaccccactctgcctcagtttcctcacctgaggacttaataatagtagctaagcaaatgaacttactaatagtagctactttatgatttttattaggattaaatgtaatggtgcatatgaaattagtaaacaagagttgcaaagtagaaaactgtcagtgaatgtcagctctctctattatccctcagagactcctcctgccactttaggtagaaagctccttaataattgtgaccataacatgtttatttctttgttggtatagtcagtgctcaatacattatctgttgagttgaactgcatttttgacaggagacaacttaagttataaaaatcctattttctatttatactatcataaaagtcgtgatggctatgcttttaacacttgacctacctgaatgtggatggtttctaaaagtaaaataccttttaatgctgtttagagtgtatggcaggatcagaaaggcatatgtgccatggcttgaatatttgtcttctctaaaactcatgttaagatttaatccatggccgcgccccacagtggctcaggcctgtaatcccagcactttgggaggccaaggcgggcagattacgaggtcaggagatcaagaccatcctggctaacacggtgaaaccccatctctgctaaaatcacaaaaaattagccgggtatggtggcaggtgcctgtagtcctagctactcaggaggctgaggcaggagaatggtgtgaacctgggaggcggagcttgcagtgagctgagattgcaccactgcactccagcctgggcgacagagtgagactccgtctcaaaaaagaaaaaaaaaaaaaaaaaagaagaagaagaaaagtgtcagtatagagaagtgagacctttaagaggtgattgggtcatgagggttctgctctcaagaatagattaattgatttctggattaataggttttcatgggattgggactggaaggagaggaagagagacctgagctggcatgctcagtccccttgccatgtgaaaccttgtgccaactttggactctgtggagggtccccaccagcaagaaggtgctcaccagatgcagccccttgaccttagatttcttagcctccgtaactgtaagaaagtttcaggtattctgttataagcaacagaaaatggactaggcagcatgtaaaccaaattaatcaacatacacaaatttttgtagcactattttactcttttatataacaaataaagccttaaaacaaatactattttgaaagaaacttacatgaaatggtcataagcataatttaaactttaaaattacatatgtaaagttttcattgtccaaacatgttgatagacaaaatggaaaagataaatagtttgtacagttctctcttcttgaaaagtattgctttgattaaaattcatattgtcccaacattgtttaattcataaatagtaaaataaatatggaacatttttttcaatgcagtatttgttttccttgaaagctttcaaaagggagagacaagaatccccagaatattagaaatctttcatatttttattacaatcactgtaatcctgaatatttttttctagcttgaagcctaaaattaccagtactttaatatacaagatgaaagtttgtttactcataccactgcatattattgtttgaaacaatcatttctggcaatagtcatacctctgcgtattattgtttcaaacaatcatttctttcaatgactctaaataaaaaattcctgcttctctttaaaaagacagtgggaataagtttctctccttgagcaatggggcccctactctgcctggttttcttcccctttcttagcacagacaccactggaagagctgagccctcatttaagattgattctatattagtttcctaaggattctttaacaaatgactgtaagctgggtggtttaaaacaacagaaatttattctctcacagctctggaggtcagaagcctaaaatcaaggtgttagcaggacttgttggttctggagactttaggaaagagtcctttccttgcctctctccttgcttctgttgattccaggcattccttaacttgtggcatcataactccaatctgagttgatggaagtagagatctccatcagtacatggtctttttctctctctgattctcttcacttcttctgttctcttctaagggcacttatcattggatttaaactccaccctaatccaggatgatttcaccttgagatccttaattgaattacatctgcaaagatcctttttccaaataagttcacatttacaggttccagatggacatatatgttatggggccggtttttttttttttttttttttttggagacggagtctcgctctgttgcccagactggaagtgcagtggcacgatctcggctcactgcaagctccgcctcccgggttcacgccattctcctgcctcagcctcccgagtagctgggactacaggcgatggggccgatttttaatccactaacaggtaccttgagactagggctcactatactttggtcagagatgctctaggcatgaagattatatttgcatgaagctaacattttttcaagactacgtgattgcactgctcaaacttacattatggtttccagagacagctagagcttccttgttcattaactttgaaaggaagcattttccctgggaagaggtgcccaagcctcttttgtaaggtgggcttgtcttaggcagtaactaagcctagagtcaggtctactaataatccattaagatgctgtgttagaaaaatcctctccaaatatgatggaaataagtatgtataagaagtatttcacagatgaacacattcccactttattaaccaagtgcctgtgtgcttgcttaaatttttcacattttcagacacttaacatattatagaaaataacatccaaagagaacatgatgtttagctttttggattctttgggataaagagcaaaccaattttgaattaaaaaaaaaaagactgtagataccacatccttaaataactcaaaagttttgtaccaaaggctactttttaaagttgaatcaaaatgaaataggtgtgaacacctatgttttgagaggcagagaaattggtttttttaaaaaagtgggaataagtgagtattttttaaaattgaaaagggtgtagattgggttcctcagagattgctaaagctgatatcataaattacctaaggacagggagaatgaagtgaattgtgtaaatgtctacaatattatacttttcttgcttatactaagctaaactagtatggatgacatgtagtaaaagttataaaaggaaattcatcttcacctgtgtacatgcaaaactgctgcatttgcagattaagtcaaaattatatatagagagagacacacacacacataacacacacacacatatattgaaaatctttaagtacatctaattttttatgactcagaaaagaatccttatttaagccctttttactacagcaaaaaatgttaatgtccattaaattaatggactttgctctgatttggggatgataattgcagaaatgagtagggatatatatatgatctaatatatagaaatggatatatagaatatatatgtatatagaatatatagaaatttctaatatatagaaatttctaatatatagaaatggagcattttaaggtctggaactttggggctgtcaacagttataagaaaatataaagagagatatatacagagagagtaataacaggtagtcccaggagtaggacaggagattagtggcccagaatcaataccatatttgttctatttcatctttttgcaagacaaaatagatacccagggggctggggaaggtgaccagtaagttacttccattattttctttttctttttcttttttttgagatggagtctcactgtgttgcccaggctggagtgcagaggcacaatctcggctcactgcgacctccaccgcctgggttcaagtgattctcctgtctcagccccccgactagctgggattataggcgcgcaccaccacacctggctaatttttgtattttcggtagagacggtgtctcaggatgttggccaggctggtctcaaactcctgacctcaggtcatctgcccacctcagcctcccctattactttcttcctttatccttttctactgtttaaaagctcaaaacttgttgaaactccctctccatcagattctgtgtgcccaaagaactgtccttggaggagagtttcaaatgtctttcattttaatgtctggccttggtgattgtttaagaagtcccctgaatgaatttttgggtgaactcggggcctagactggctcaggaaatctggcactgagccccatatttactttggccaaacacaatacttgctgtgcagccacattcactatgcactgctcacaccacgcagcttgagagctttgtccctgattcaaatctgctgggtattattcagtctgaaaatttacttttacaccaagcatataaacaaaatgaaatacagtttaagaaatcagctcataacatttacaattaaattcattaatcaaggcagcttatggaaatgccacatgtgaactgtaaactttataaatattcaagtagtgaacaactagacaatcacattggcagctttgtttcagtataagtgatgtagaatattaccatccatcagcttgcagttttgttttaaaacttgttgaaccatgtatatcatcaaaaagaacttttggttacatttctgtttccatatgtttcccatttaccttcctctctagatttatgtgccttcgtactaattagcacctgcactgaattcagaaagcagcacttgaatcaaaccaagtcaagctgtctgtgaaggaaaaaaataccaagttccaagatttcttgttaatggagatgaacagtacactttgttgatgttcttattcacatgtgtcttcttaaagtatgagaatttagtatatgttctttcagtatatgcaaatatatccacatgggtattttcaaactatgctgcagtgtgctttgtctggttaccagtttttattctagtacaagaatgcaggatgttattcgtcacattcacactatattaatttaacctcctaggtctgggaggagagaggaggaaaattaaaggaggcccaagctttgcatttgagagaaaaagtgaactgggtcttgaaagatgtcttaagaaacaaaagagagaaagaaaatagaggaaatgttagaagttgaggtaaaagtgtgtcatggagtaaagaagagcatggagagaatactattagtcaagagaaactgcagctcaaacactcaaatgcagaagcatcataaacaagctaaattccactcttcctttagttcatgtgttttggtctatgtaagctgaagacaaactctcctttttccatgctcccatacctcatagaatgtgtttggaagtattctctcctcttctatttttcagaataaattgggaaaattggtattacttctttaaatgtttggtaaaatgcagcagtgaggccatcagatcctgggcttttctttgctgggagactgtttattattactttgatctcattacttactattggtctatttggattttggacttcatggttcaatcttggtaggttgtatgtgtctaggaatttattcatttcttctagcttttccaatttactgccatgtagttgcttatagtagcctctaatgatacttctaatttcagcagtatcagttgtaatgtacccttcttcatctctgattttatttatttgtgtcttcttattaagatgctatgttagaaaaatcctgtcagagtctggctaaaggtttgtcaattttgtttatcttttcaaaaaatcaactttttatttcactgatcctttgtattgttttcttcatttcaatttcatttacttctgcactgatcttgatcattccttttcttctgctcgtttttggtttggtttgatcttgcttttctagttctttcaggtgcatcattagggttttttgtttttgaagtttttcttctttttttgatatagggtataaactgccctcttattactgcttgcaactgtacccgttaggttttggtatgtttctgtttccataaccatttgtttcaagaaatgtttcaatttccttaatttcctcattgactcactgctcattcaggagcatattgtttaatttctatgtgtttgtttagtttccaaaattcctcttattgatttctagttttgttctattgtggtcagagaagatactttctattatttcaattttttttaatgttttaagacttattttgtggcctaacatgtggtctatccttaagactgattcatgtgctgaggaaaaaaatatgtattctgcagccattgatgaaatcttctgtaaatatctattagttccatttggtctatcatgctgatcaagtccgatgtttctttgttgaactcctgtctaaatgatgtgtccaatgctgaaagtggagtgttgaactctccagctattattgtattggggtctacctctctctctagctctaataatatttgctttatatatgtggatgctctagtgttgagtgcatatatatttacaattcttatatcttcttgctgaattgacccttttatccttatatagtgaccatgtagtctctttttatagtttttgtcctgaaatttattttgtctgatataactgtaactattcctgttcttttttggtttccatttacgtggaatatatttatctatccctttattttcagtacatgtgtgtctttatcagcgaagtgcatttcttgtaggcaacagattgttgggtcctgttgttttatccattcaactactctgtgtatttactggggagtttagtccattgatattcaatattagcattggtaagaaagaacttactctgccattttgttgttttctggttgctttgttttcttctttcttctttccttccttcctgtcttcattttagtaaaggtgattttctctgctagtatgtttttaatttcttgaattttattttttgtgtatcagttgtatgttttttgatttgaggttactacaaggtttagaaatatcatatcataactgattattttaagctgacgacaaattaaaactgattgcataaacaaacagacaaggaaagagaaaagtaataattttacactttwactttgtcctcctactttctactttttaactttcattgtttcttttttttttgagatgcagtctcgctctgttgcccaggctggagtgcagtggcgtgatcttggctcactgcaagctctgcctcctgggttcacgccattctcctgcctcagcctcctgagtagctgggactacaggcgcccaccaccacacccagctaattttttgtatttttagtagagacggggtttcaccatgttagccaggatggtctcaatctcctgacctcgtgatctgcccgcttcagcctcccaaagtgctgggattagagacatgagccactatgcctggctgtagttattatttttgattggtttgtcttttagtctttctactcaagatattagtagtttaaacatcgcaattataatgttatactatcctgcgtttctctgcatatttactatcatcagtgagttttgtatttttaattgattcttattgctcattaatgtccttttcttaagaaatccctttagcatttcttataggacaggtctgttgttgatgacatatcaacttttgcttgtctcagaaagtctttatatctccatgcatgaaggatatttttgctggatatactattctagaataagaggtgagatcttttttttttttttttccacactttgtgtatgtcataccactctctgctgtcagacattttggagcgccactatatattatttgtttattttctcctgttgcttttagagtcctttctttatctttgacctttgggagtttgattattaaatgccttgaggtagtcttctttgggttaaatctgcttggtgttctataaccttcttgtacttgaatattgatataattccctagctttgggaagttctctgttattatccctttgaatacactttttatccctatgtctctctccaccttctctttagggccaataactcttagatttgcccttcagaggctattttctagatcttgagcttgtgtttcatttttgtttgtttgtttttctttcttttgtctcttctgactgtgtactttcaaataacctgtctttaagctcactaattctgttttctccttgataattctgccattaagagactctgatgcatgtaaattacacttttcaactacagaatttctgcctgattctttttatttcaatctatttgttaaatttatctgatagcattctgacttctttctctgtattatcttgagtttcactgagttttctcaaaacagctattttgaattttctgtttgagaggacacatctctgtctttccaggattggtcactggagccttatttaatttgtttggtgagatcacgttttccttggtggtcttgatgcttgtgcgtgttcatcagtgtctgggcgttgaagagttaagtatttagtgtagtctttgcagcctgggcttgtttgtacctgcctttcttgggatggttttccaggttttcaaagagacttggatattgtgatctaagtttttgttcactgcagctatgtctgcattagggggcaccccaagaccagtaatgccatggctcttgctgacccatggaggtgtccccgcttggtgttcttgaataagatccagaagaattctctggattactaggcagagattcttgtcctcttcttttactttctaccaaacaaatggggtctgtctctctctctctgtcttgagctacctggagcttggggaggggtgacactagcacccttgtggccaccaccactgggatggcgctgggtcagacctgaagccaacacagcattggatctctctcaaggcctgcaatgaccagtacctggctactgcatatgtttgctcaaggtcctaaggctctacaatcagcaggtagcatagccaacaaggcttgtatctgtcccttcaggacatcaagttcccctttgccctaggagaatccagagatgccatatgggagccaggacctgaagtgagaaatcttaagaagctacctggtgttctattttacgtgactgacctggcaccaaagctataagacaaagacctccccgttcttccctcccttttctaaaagcagaggagactttccctgaggctaccaccaccctagacctatggcaagtgctgcctggctactgccagtgtttactcaagatccagtagctcttcagtcagcttgtggtaagtgaaaccaggcctgagattctcccttcagagcagtgggctacccttttgctgagggcaggttcataactgctgtccgagagccagggcctggaatgggagatcccaagggcctgcttggtactctaccctactgtggctgagctggagcctaagctaaaagacaaagtcctctttacccttctttctccttttctcaagcagaagcagtcttttcccataactactacagctgggaatgttctgggtcacacctgaagccagcatttctcagtctcaccccaggcccacagtgagtaccacctggctattgctgctgattattcaggggccaagggctctttagtcagcagatgatgaatgctgccaggactgcttccttcccttcaaggcagcaggttcccttttggtccagggtatttctaaaaatgtcatccaggaggtaaggcctgtaatggtgggctcatgactctgccttttgccctatcctaccatggataagctggtatccaaattgcaagacaaaggcctctactcttccctctcctctccttaggtggagggaaggagtctcacctgcagctgcaagctgctctgcctagggttgggggtggggtggcacaagcactcctttggctgcccctgctagtgtctcactaggtcacatgtcccccataaacactaattctaaacccatcccagcatcagtacttgcccaggaatttcagtctttgtggcttagactgtcgttcaagtttatttagtaccccagaacactttaacttatggcagtgaggcttgctggatttcagattctgactgctggaatgggcaatttcactctggctagggctggtctatattctccctccactggcgctagctgagttctgcccagtgttgctttccactgtgacagggcagcactgagttccaaagcaaagtcccccagtcgctgcactctccctyccccgagcacaaagattcactctctgtgccacgtggccactgctgacgcatgggggaggggtggcatcggccattcaagactttctttcctaccctcttcagtgcctttttcactgatatatagcttaaaccaggtacagagattgctcacctgatttttggttcttagatggtacctttttgtgtggatcattgttaaattttgtattcctacaaggaggatgattggtggaggcttctatttggtcatcttgctctgcctttccaaaataatttttattctgtaacatgttgccctgttacccacaaaattgataaaccagacttccttatcttcacccaggttgttggttaaaatgcaaaattagaattctggatgtcctttgaatcatgtttccaggttaatctcaagctattaatcaatactgtctgagtacagtatttaaccagcaaccagcaattaatctacccaagagactatcatcaacatcacatttcaaacaacaaaaatcaatgatatggttacaacaaaaatcagtgatatatttaatagtccatgttttttttctataaatcaatattgcgtatctggcactgtagtactcatatctatcccatttcttttgttgaaattctcaataacctcaacttttgatttcaaatgttaggccttattatatttaatgagaattaacactacttaataatgttcatattatatgaatggccattatgctgttttcgtgttttaaaaaaagtttgcaaaaaacattaattttttgcctaaattattttgaacattagacatgttatattttagcaaccctaataataataatttttaattattacacttaatatcctgcccactttgaaatattgacatcatagagcttatgtatgagacaggtaattaagtagttaacatttagtaaggatgttttatgtggcaggtactattcttagcattatacacccattaccgtacttaatgttcacaccaacactatgaggtagacactttttttaatatactttaagttctagggtacatgtgcacaacgtgcaggtttgttacataggtatacattgccatgttggtttactgcacccattaactcgtcatttacattaggtatatctcctaatgctttccctccccctcccccctccccccaccacatgacaggccccagtgtgtgatgttccccttcctgtgtccaagtgttctcattgttcagttcccacctatgagtgagaacatgcagtgtttggttttctgtccttgctatactttgctcagaatgatggtttccagtttcatccgtgtccctacaaagttattatcctttccagatgaagaaactgaagttcagagaagttaagtggcttaccaaaagtcacacgaccaggattcaagcctggataatgtggctccagggtctgttcccctaaccactatttcataataaggactatcttccaactaactctgtatgttacatactgctagttcaaagccaggtagacgaaaaaatactccctgtttcagctgaagaaggttttccaatatatttttagctgcaaatataaaataccacaaagccaatttacattaaaggagaattgtacattcaacacatcagcatttccacaggattgtagaataatatattagaacaaaaatagtgtttgtaatagaaatacagttattttactttggagaatgggcttggaaatggcagagataagaattataagttatttataattagcttaataatttcggtattcttatctgcagccatacagagttatgtgagttgtgaactgggataggacattaaagctgacagggttacatctggatcagaaacaagacaaaaaagatatgcctcttcatgagcctcatcaatgccccagcatatattgttattgctagcacaacattagggttttgtctaaattttacttatggttttagtgtattttaaaatatttaaacaataaattttattttacataatctcaattcaagatttcatacttatatcttttgttatcagagaatattaattaaaatttaccatgtacatagaagaaatagatatataatatgcctcatttaataatagggctatgttattataacaaagcatctgctctgtctttctctcaacagaccaaattaatctttgccacattattccttggacatttgagaggttaaaatatatgcgcatatacatgtaaaaccaatttgaaaaataaaagttcccaaatgtttattcagtgtctactttgtggcaggcactgacctgagggccgaagaaaaatagggagggtctttcccacaagaaggaagaaaaggaacagatggtgcatgattaccaggttcagtggtttgcatggagtgctcttcaagcactgataaaaagtgtctaaatcagattagatggaacaatgtcagatatggcttttagaggatgtgaatctgacctcaatttgagaatgggtagtagttacctacatagggatgaccatttatgcataaagtacagatacagttaatcccactttttgataatgagggcctggaattctttcatatctaatgaaagaataaacctcctagaaagtccatgcagattgtatggtacacattttaattggtgcctaagaatgactgtagttggagaaaggaaggtgaaaactgaataatattcttgagctgagaatatttctatagccttactttaagcacacatcttaaatccaggctaaaactcttagactggcattggcaattagctatttcatggatataaactaaggagacttgacgttaccaacctgcttggggagtattttgctgagtctatccaactgttatcaattcgagaacaatactttttaatttgaatcaacctgtttttttaaaaaaggttttgttttaactaaattcatctgttctccccacaaaaagccagtttgtttgtacttacatatctctatgtatacatgtatatatttttgagtctgcaatattcttgtcagaataattttgcttccttgaatatttcaactattcaaaaatttactgggttaaaacaacacacacttactatctcacagtttccaagggtcaggagtctaggcatggcctagctggtcctctgcaaggctgcaatctaaggtcactagggttcagttttcatctggaggcaccactggtgatggatcaactcctgaggtcactcatgataatgagagaattaatttccttgcagccgcaagactgacggtcgcaacttcttggtggctgttacttatatcagaggttacgtatcagaggttacattagctcttagaagccatcctcagttcgctactaccttgccctcgccatagaccctttacaacaagcagcctgcttcttcaaatccagcaagagaggaagagagtgagtttgctagtatgactggattttatatagcataagcataagagtgacagggcatcacttttgccacatcttatttgttagaagcaacttaaagttcctgcccatattcaagatgaggaaaatataaacagttgtgaataccaggaggaaagaatcatgagggttaccctgatatctgtctgccacatcccaaaaagaaaatctatttcaggctttggtatcatttgaaaggtttccagataatcaggtagtcaacattaaataattgtttgaatgacatttaactattgcacaaacaggtgcctctttaaaaaaaaaatacacacacatatacacatacacttttttaaagcagagtccaagtgtgccagtaactgacttgagtataaagcttatttttttaatgttatttatctttcaaaccataacagaaaataattttatttcaaatgatggttatatatttttatcattattaaatataatactatttttctccaaatttatcccacaaattttctcttttttgtgtaattgattgtgtatagtataaaactataggtcactagttttagcaactgattgaatttaaactgattatgtgtttggattttctatataagctaattttaattacattaaatgtttatagcagtttgtaaaaagagatgcaatcgtaacattttattctatattattttaataaacaatctatttttatataacaaaatctataaagatattgacaagaatattaggttatattaaatgtttacaaatggtcttttagattaaataagttgcattgaaataatgtgcttcagtctttcaaattcattttaacaatttgttcagcaaatattttattaagcaagtgtcaagtatgtactaaaagcttacaacacaagagcaaccaagtcacatattatttgaagccctaaatattcagggctatgttagaagagtattaatatgaaataatgaataaggacattaaaagtcagagagtttaattgatatattataggttataaatttagggatcctaaaattgggattggagtccaggtcttctgtatcacagtttactggcctttcactacctcttgtagctcttaagtaataagttgccttcatttgtcagagagggtgatcagtgccctgcaaagttcttttcatgaagcagttatagctttgtgttgatccatagactctctggtttgttccccattgagaccagctaagccatgagtcacaagctgatggttagagttcagcttggaaacatgaaacagaatgaggttaatgacacagatcagaatcaagcctgtgactttgttttcattagtatcatgctctacataaatttgctagccagtcgtagatgtcaaagtagaattcaatctatacattagtttttctcttcctcctttgacctccagccgtgtaatgaaagacttcttcaagaaggatggccgggcatggtggctcacacctgtaatcccagcactttgggagcccgaggcagatggatcacttgagaccaatagttcaagaccagcctggccaaaatgatgaaaccccctctctwctaaaaaaaaaaaaaaaaaaaaaaaaaaaaaattagccgggcatggtggtgcacccctgtggtcccagctacttgggaggctgaggcaggaaaattgcttgaacccaggaggtggaggttgcagtgaggtgagattgcaccattgcactccagcctggatggtagagtgagactctgtctcaaaaagaaaaaaaaaaggaatctatgtagttttatagatttgcaaaaaatactatattcccaatgtatgctgtgactcttaaaagtatttactaaatgttgccaatatctagaaccatctcttaaaaaatatttcaaacatatcagtgttaacaattaatggtgaaacaacaatgtgattaaatggtgttttaagtaggttttaaaaccaaattatatgtacattgcattggcttgtcagactctagttattaaatgcatcgattttaccctgggaacactcttatttccctacagtttaccttttaataagtgcagttggcacatgttttgaccagagttattatatgtcttattgttcactgtatgtctgggacttttttttgttttgcatgaacttggcagcaaattcaaaacttttctcacattaataaagctactggttaaaatatgtcaagggcagagtagctcattcttgtaatacggttgtatatacacacacctttgttttgttgttatagaaaatgctaattagtatttcctgatgacatgtgagcttgttgcatagattattttccacttaccttaggtcttggtgtattaggcaggctgcgaagcacagcttgcaggggagggccaccattgtccttttctccttcaaatattatataaaagttcaggaaaaaaagcattctcatagattatattttgtgactgactacccgtattttggggtttgtgtggtgtgatgagtagagattaaataatggaactaacttggttatagatagttctggggactaggagattaaagacaataacagatgtggggaaaaattacttttgtagaaatattcaagagaaattatttcagagaaataaatgtatgtttcatgtttagttcaatgttattttcaaaggattatgtacaagagaacccccactgtattttttccggagtgatgatgttcctgataatttatgtcaccaaaaagaaatgtgttctaaataaatgaaaattacctttagaaaaatacctgatttactcatacttcctattaagagtaagacacgaatatgagagggaaaagtaatacaatcctgacataatgcaatgccttagtccctagtgaggtaaaatatgtgatacatatatgtttaatggacattattgtgaagaatacaagaacaatgacagttatttatattgcaacttagaaaggatacaaatgaatggttttctttctcaaaacaaactgtaaaactaaggcaaaccattttcctttccaaggtctgctgaagctgacagctgccacaaagcttattcccagtgttctccaatatgtagccacaacaagttgttgagtcctcttaaataactaatgtcagttattaatataaactttagagtactcttaattgtgattgcaccatctctttccttggtttctgggaccatttctattcttcttcctatggactcacctttcttcagtgtccttttctgattccttctaatttgtccaattcaatcctcagactgttccattctgccctagytggtcatccattgactgacaattcacaaatctatttctccagcttcagccacaaaagagagttaatatgtccactctaactcagaatctctatagagaaatgtacaaattatactcaaggtagacaaacacaagtacactatgtttttgtactccacttgaagctttaatagattctctccaacttaatctgtcttaaaacaaactctggatttacaacyttcaaacstgctccttccccagaaaccccacttcactcaatagaagcactataatttgggttgctaagaccaaacatcttcaatttcttttcctttctttccttttacacacatacacacacacacwyacayacacacacacacacacacacacacacacacacacccctatcagtaaattataaccaagccttaactatacttccccttctcctacctacttcttccacgccgggccaagccagttatctttcttaattgttgaaatagcttccaatctgctatatgtatctccacacttgccattctaccgtctgttttcaacatggcagccagagtatgatcttcttaaaataaaactcagaccatgtcacacttctcaaaacctgtcaaaggcttccatctcattctgaatcaaagttaaaacctcttcccccaaacacacacacacacacacacacgcacatgcacacacacacacacacacacacacacatacatcttcctggctttgtcttttctgatctctccctcaacttgctccagccacacaggcctcctagttgtcttgccctgccccacagactttgtcctgacaatcctgtctgcctgtaatgcatttacctagcttccctcaggtctctgctcaaaaatcacctcaacagagaggactttcctgaccacatcttgtaaaattgcatacctccctctcccaggctccttacctttcccaggctccttaaccaccccccatctttgtttttctccacagaacttattatcacctgataaaatatgtatattaatattgttgtctattgtctactttaaggatgacagggattttgtaatatttgtgccatagtctagcacctaggacatgtagtagttattcatatgtattaaataaataagttatatgaaatatatcatttaacagctgatttgcacaagtgggagtcaatatgtcaatttcaacttagaatttctgtagagaaatgtacatattctactcaaggtggcccagactattcttaaaccatatttaagaaggtgaaatagagatatgatttgatggtttttattattatatggttttcagtattggatacagcaskgcacaaattatattaaaactacaattaaaaactacaatttcatgccaaaaaaaccctgattttactctgatcatccttcaaggctgttgttcttgattctagcattgatatttcatgtttatttcattacattttatactattttaaaatattaaatatttaaagcatatataagctattttcacagttgatttgcattaagtggaagttaatatgtcaattctaactcagaatttctaagtagaaatatacatattatgcctgaggtagacaaatacaaatatactatatttactataccatgactatttagtatctttaatcccataaaaattaattacctgacttatttccaccaaagctcttctaattaaagttttggaccacagtgaaagaaaataagctttaatttatatgtattaaattttgtatatcttcctttttctctctccaatggaagtcttatgaatgtgtaatttagacatgtttgtctagctctcacatatatgaaaggtgttactgttagcttttctaaacagaacattgtaacaactgccacacctacaaccccattcagccagaagtgcaactccccaagctttgggaattttctactaaaggacttgaaagagtcaatgtttcatagttaagttgggattaaggaaccatcttgaccacagatttctgaatttttttagtatataataatcattggcaattatcttgtccaataccttccatataaaaataagaaaaaatgaaatattcctcatgcccttggaaaattgctggcttagttttcttttccctgtaatggcttaccatctggtcattcaaactgggccagccacttctcaaggctgccacactagcctattgctccttccatgatgttttccccaatgtttgtatttctggttcctccatgtcattcagttctcagcttgaagaacacttgtcagggaggtcttctctggcacccaatctaaagcagccttcagtcacctactagcatatctcttattttatttttcagaataacatgcctcactatttcctttctgaagtgtttgtttttagatttattatgtgttattgttcatcatggtacattaaatacagagggtagcagccttgattgttttgttcaccacagtatccccaatgagtggaacatttcctggcaattagttggtgctcaataattatgtatttaataaatgcatgatgtaatccttgttacttttcatatttgtattagtgactaaaaaccatgagggggcctaagaatgtacaacccaacaaatacagactttccaccagccacatcatgggccatttaaaaaaacacaaaattaactgatctaattgtcgtaagtcttcagagttatatgcccagttgtttttgacattgccagactactctttgataaacctgtcaatacaattaatttgttgataatatgcatatctcatcaccaagtgcagtcttactttcctgcatctgaaagaagaaagacaagaatgctttctgcttcctcttgacattttccttcccgggaaatattttcctcaagtatttaaggtgagttacattaaaatatwgaaaaattagcttaaatcttttcttatcagaaaaataagctgatcatattcattcaacaaatgatttctgagcacctactatatatcaggctcttctgtcattgggattggtttctaatggaaggagcagataacaaacaaataactagacggcaacattcacgtgttattatatccttaccacagtcctttgatgtaggaattatcattcagactcacactgccagctgcagagttgggatttgaacataaatttctattagtttaaagcctcctccctttgtactttattgtttggaaaaagaatattctatgaaaatttaaataataataacaaaactgtgagtcttatagggctttaaaatcattataatttatacaaaaaataaattatccatttaaacagagaaattattcctatgttttggtcatagaaactaagtgcattatacattaccataatacattactttaaacatctaaaaaatgaattatagtataaattagacctcatcaaaagatcattcagttacatagtttatcagttattgtccaaagtgttctcagtaagacagctctaattgctttaaagtgtttaatatggcagacattagattctggtaggtggataagccaatctttaagtcaaccgatgctcctgtaactgcccagtgggttcattttgcctcctgcccagacagagccaatttatcaaaacaaacgaattgcaatagaaaaagtttaattcacgcagagcctgctgaacaggagaccagagtcttattattactcaaatcagtctctctgaaaattcagagactggggttttttaaggataatttggtagataggatgccagggagtgctgattggttcggtgggagatgaaatcatagggagttgaagctgtccacttgagctgagttggttcctgggtgagggacacaagaccagatgagccagtttatcaatctgggtggtgccagctgatccttcgagttcagggtccaaaaaatatctcaagcaccaatcttaggttttacaatagtgatgttatccctaggagcaactggggatttttagaatcttgtgacctctagatgcatgattcctaaatcgcaatttctaatcttgtggcaaatttgttagtcctacaacagccagtctggtccccaggcaagaaaagagtttgttttgggaaagggctattatcatctttgtttcaaagttaaactataaactaaattcttcccaaagttagtttggcctatgcccaggaatgaataaggacagcttggaggttaaaagcaagatggaatctgttaggtcatatctctttctctgtcataattttttcactgttataacttttacaaagacagttttactcctatgataatccttcagttagttcactgtctagttcctgggagtctgttttgtggatcctaaccctaccccaaggattctactgcattgtaaattctgactttacatttaagacatggagttctttgggggcagggagataaatatcctattttaactatcaagggttaaagtgctttcaaggatctagtgtctggtggtgataccagagtcatacaattcaaattacaagcatctgtttgttgtgttgagagcagggactgataaatgaggcactttttgattgtgcaactgggtataaaacagtcaaaatgatgcttataacttcaagcttttctcccacttgaatcagccaacaagattttcatacaacatttagaccagagtagctgatgcttctgtttcttgcattttgtctggtttgggatcaattttgtagtcatggatgtagttatagctctttggtatgtgaacatgagagaggtgtaagctcataaaataagaaaatctgtttttgttaaagtagacgatgtgcaattcagaaacaatgaaccatatcaactaaataatgggttaaatcagtagagactttgtcaatcttgtattgatttaatcatttcaaaattatttattcattgtctataggtatgctaggagaatagttgaatacaaaaaatgttcttacactcaggaacttcacaatcaggtgcaaaaatgagacaggcatactcacattaaaaattaaatgacaattcaagaggcggcacaggcagtctaggataaactgccatatgaataatagcaacaataaagtagatgagctcccaaaaaggaaagatcgaggaaggcagcatggaaaaatttgacattgccttgtgtttggagttgaacgagttggaagtgaataagtagaggtttttccacgttgcagagaagtacgatggtggggggtatatatggggcattcaaaatgcatgaaactaggaattcgtttgtcatctttaggaaatttcagaagtagtttctgaccattttatgtgggtcctttattttcaagtttagacattgggattttatcctgagaataatggggaaccattgaaggttttctacaggggacaaggatagcatgttggaatgactaaccagatagaaatatgcacaatttcttgaaaatagggagaacgagaaaggaagaaagcagaacagtggttcttgactttaatgtgccacctaagggcmaggtgcagtgggtcacaccsgtaatcccagcactttgggaggccgaggtgggtggattgcttgagtccaggtgtttgagacaaggctgagcaacatggtaaaactccatgtctacaaaaaaatacaaaagtggtggtgtgtgcctgtaatcccgctgctcgggatgctgaagtgggaggatcgattgaggccacaacattgaagctgcagtgagccatgattgcgccagggcactccagcctgggtaacagagcaagacccctttgtctcaaaagaaaaaaaaaatccacctaaggagcttgttaaaattgccgattcctgaaccttactccagagattctggttcagcaagtctggagaggacgcataatctccctgttaagggttagattctaaataagtggtcttcaggccacattttgaataatactaaattagaaggctgtcacaataatctaggagtgaaatggtgaaggtttgtattataattttggaagcagggatgaaaagaaagtgatggttggtagagatatagtgaaggaagaattgataagacctagaaatgtttgggtataagaaatcaaagggaagaaatagttttaaatgatattaatgtatttatcatatttgatatttttgttaatgtaactggatttgcaagtcacttaacttactttaaaaagccagtgcaaatwaaaataatgtacaaattgtaaaccaaggttgaaaatataagatcaaatgatgggtatgggaatatctgtaaataggaaagaaattcataaaaaattaagctaccactttgtgttatttccaagtgtattctaataattagttttccccatcatggatttaattaattcttagtcaagatttctggatttctttaatcattaccttttgaaagtagatgtagaattctcaattatctaaatcttccacatttagctgagagaccaactctagggaatatattagagtattttcatagttccatcagactatgaaccccaattcttagttaaggcactatagctatgggaattatagtccatagtgaataaaatatacaatcatggaccttattttgaatagcttccagaacaaacatatgcgaacatcttgaggaggttattatggctaggttctagcttgcatcactaagtcatcaagaatgggagacaaaaggtataaggaaaagttttcagtagaaattataataattgtcagaggaattatttcagtctcaggttgatgcaaatttgggtacagtggatgctgcttccacttgttttcggaagccgtaaccaataatcaaaagcaagcaacttttccaaaagtaattccatcttgttttttaaaaaaaagtttgagtttatttaatatcttcatttagacatgtgaacaaattgtttgcctttttcattaatgacatctgagtacttgtgtagattgccttcatagttcatttgaggcataatgcctcaaattaggaactggaaatgtttctttttaaacatgaatattgcctaaaattgctgaaattaccaagtctttaatttcatcaacagaagaaaataggcaaagaaattcaggcaaattgaagagttaaaacgttatgtataggtcaggttcagttcagtgcaaataactgtaatattcctttatgttttaaagggatgtttggtttgagagggaatgctttcaccttctgaaagggaagagggaggtcaaatagtgacaaaagaatgaggacttgggggaagtttcagctaagaggacaagcaaaagaaggctgagaacaaacagcaatttgtggtgggcatgtttgggagctgtaaagagaatagctcttgctttggagtaaacttcctcagtcagaactaggtccttgaattcagaccagctctcatctccttggtccactctagggctgatggaggctgctgaaatcatcttttgctacattaatactcatttttcgctcaaagatgacaaggagtatttaaacgcagagagaatgttatttataaatgatgatttgttcgtgatagaacttgccacatagtattttctcttttttaacttttattttaggttcaggggtacatgtgcaggtttgttatataggtaagctagtgtgatggaggtttgttgtaacaggttattttatttcatcacccaggtactacgcctagtacccgataattattttttcttttcctccccctcctcccatcttccaccatcaagtagatagaccctagtgtctattgtttctttctttgtgtccacgagttctcttaatttagctcccacttataaatgagaacatttactaaatggatctttataaaaacagtttgccgaccactaatgaataagaaaatattagaataaaaaagctcaatgtcactgatcattagagaaatgcaaatcaaaaccacaatgagataccatcttactccagtcagaatggctgtgattaaaaagtcaaaaaaataacagctgctggcaagatttaggagaaaagggaccagtattcggttttctgttcctgcgttagtttgctaaggataatgtcctccaactccatccgtgttcccgccagtgacattatctcattctttttatggctgtgtagtattctgtggagtatatgtaccacattttctttaccaaatctgtcattgacaggcatttaggttaattccatctctttgctattgtgaacagtgctgcaaggaacattcacgtgcatgtgtttttatggtagaacaatttatattcctttgggtatatacccagttgtgggtttgctaggttgaatggtagttctgtttttagctctttgagaaaccatcacactgcttcctacaatggttgaactaatttacactcccatcaacagtgtataaatggtcccttttctcctccattctgactggaataagatggtatctcattgtgattttgatttgcatttctctaatgatcagtgatattgagcttttttattctaatattttcttattcattagtggtcagcaaactgtttttataaagattcgtttagtaaatattttagactttgtgagatatacagtctctgtcatactcaactctgccactgaagtatgagagcaatcattgacatttactcatgtaattacatgggtttggctatgttccaataaaactttatttacaaaaacagatagcgagctgaatttgtctaatagccacagtttgcctgaccctgtttcattgcagtatgtgctatttctattgtgaatgaaaaggctagcttagaaggctaactactttttctggcttaggaagctaactactttctctagcatagtttcctagagaaataggttctcgattaaaaatagataggaacctgacccacactgtatctggcaaattctttaactaaagaaatgtaaaacgctttggaggtacctaaatagtggctaaaaattgagttccagtgttttctaattatgagatgaggacacattttcctcatctgtaaattaggaataacaataccttcttcataaaaaggccatggctatcaaatgccatcgcataagtgaagtgcccactgcagcagcatctgacatagtaggccctccagtaaacatctgttttctcccttctccattgccaggaaacacatatggaatagaaataaaagtagaaacaaaggagagaagaaggcagaactagtttcagttttaaaatacagaagctctttatctcactaaaatattcattgccggcttaaaggcaaagccctattactagttcaacacagttcataattttcaaaagcactacccctgtcatggtactgtgggagttcttggttttttactcccctaatttcctaaattatatgtataacatcatatatggaatataataatgtatatatgcgtgtatacttaggtatacatgcattatttatgtaacagatattgtgctgagcattttacatctattatctcatataatctttacagtaacattgcaaagttgattctgttattttcatcgatgaaaaaactgacagagaggttaatgtaacccatctgtggttacacatctagaaagtcttggagctgaaacggaaactcagggcgttctggctgtaatgcccattctcttaataaccatgataaatgacatacttttaagaatgaataatatttaactgtgatgagactactgatttggtttagattcatcatttctaagttacttgaccaacatcaaagaagaactgggtcaattagtccaatctgtggtttataattggccaattagtccacatctttgaatctgcacagggaccacttgcacataaatctagatctacatttgccacgctccacaaagcattctgaacaattcactgtgttcaaaaatgagatttctattatttatgcatgaagaaaatatgctgttttccatgcactgagccagggggaaaactactcagccttggtaatattagaccatggatcttccatttattttaaatgatagtgtcatgctgaggaaaataatggttcatatccttcttctccttcctccaaatactatgtcaaaactactttgattaaaataaataaaatcttgtatcactgtgccaactctgtaagaagacagagcaagcaagcaaacacattaaaaactaaggtgttggagagtctgccgtgacttgtgaattctgtatattttttcctttcctgaagttcttattttcttttcttttacttaccaagttacttggaaatttaacaatttaataaaaataaacagcatcttttcccaatatttaaaaaaatgtattattcattaaaaattttgcattcacaaaaaagtgaataattgggctccaatctgagttagtttatgagtgttccccaggtacctatcctctctcttttggagagaacatgtattccttgaggacagattaagaaactagtcttcccttaatgctgggagcctctttgaagtcttatttacttcagatcttaagggagaattgtggtacgctgaaaagtatcacatttgttatcacttgaggaaacaccatttgatctaatgagctagactttttcatctttcaattcatgacagctatagctacattagaaattgcattttggaggtcttggataattatctaaaaatattcacaaaccccttggaggctaatgaatttaaacttggatggctaatcctaaaatggctttattccagcaaagtgggagagaaactccccttcttctgtttatttaaggtttctagtttggggtcctggttctagtttggagtcctggagttcctttcaatgtgtttccataatagcctgattcagaggagtcggggagaaagaaagaaacaaaaagaaaatgccttgtttattttatttacatatatacatacatatctatacatatgtaaaatgcacatggtaaagcatagtattttgcacaaaatcttaagtaaagacagacttgggtttagatttataataggatttagtaatactaataccaataacagcagcagcaaattcttgagtgcatgaaatggattactttatgtaatttctgcaaagtcctatcatgtatattttgtcactagtttattttacagatgaggaaactaaggctcagcaaagctgtaaaacttggccaaaaagtcatgcaatttttgaggattctgatttgctctgtctggtgcttatacccatcttcttaaatagaacaatcatgaggaaattgacaatgtccacagacataagacacgcttgcagagaactaggtattgggacactgcagagaggcaggcagggaacactggcctgaagtatgagctttgaaactggcagtcttcattgtaatcctggctttgcccttgctgtctgtgtgtccttggatgagttaccatcttctgtgtgcttcagtttctttatctgtacaatcgggatagtaataaactaatttttgaaaaccagctaaaataatgcctggttcatagtaaacccaataagtagtagttgtcaatttattaggttggtgcaaaagtaattgcagttttttttctattactttcaatcacaaaaatcgcaattacctttacaacaagctaataggtatcctgcctgctctgtcttatccctttcaccctttagagcagctaaacattagacgagtgcctcatccagagatttattgcaatattttatacatcagaacagtttgaagaacctgagataatattgagaagatagagaatttttctctgtcactccccatcttctattttaaactagtaattctcctctcttgcctgcaaaccccgcttcctaatccttaggcaactgtcctgagttcttgttagttattactaattcctgctgtgatgttcgttgatagctacaatgttagatgataaggaatattatattttaaagtcagatatttgagaaataaaattgcattctcactccaagaaaagtttctgcatatccaaaggatgtgggggatagatatttaggaatatatgtgtgccaggattgggcaactcgcagccaaagaatggaacaggtttaccttggatttgagagctacacacaccacttcacaaaaatttttatcttaatttggtattaactttatttaactataaaactttaaaactaaactttgagaggaggatgaattttgttttaaagatgtttgtagttatttttagctcagagttctatttaggttccccaaattttgtgctacaacagttttaaaagtctgcccagttatttaatctggggagattacaaatacagtgttgacgactggcctgcagctctctcttctgaaatgagatattcaactccacatggcttactgcctcttcctatcccacttagtttccatctcttctgctggtgatgatgtgagttccctaccctgtggggttacaattgcccttatggtttttcttatacaatattcagcattataacatatgtaggttatagagcatataatatatgaactgcaatattatcaatatgttgtatctacctgtgggctccttccttctctcagttaccatattttccttcaccactcactgggtaacaaccatctgaaatttcatgaattgcataacctttccatttttaatacttttaaaaaatcatatatgtatgtatcctctaaaatcttgctatgtaagtatggtccacagatctatgcatgaacattgcctgggagcttattagaaatactgaatttcagcattgccccagacctactgaaccaaaataagtattttaacaagaattgctgttgatttacaggcacattagtttaagaagcactacaccaaaatatattattttgtcttcctaggggttgttttgtttgcttgttttcttatttgtttcttgtttttgagtgttataagaatgacattctgtttgttgtcttctgctacttgctttgtttgctcaacagggcattttaagattcatccaggttgctttctgtagttgttcatggcttcctgatgtaacatttgtgctaatagtccttcctgctaaacacttagtttgtttctagcttgtgttatagtgtataatcctgctatgaacagtctggtgcatgtctccgtgtgtgtgtgtgtgtgtgtgtgtgtgtgtgtgtgtgtgtgtgtgtgtgtgtgtgtgtgtttgcatgtaagacattttctgtgctgtgtacccaggagtagaattatgaattgtagtgtatgtgaatgtttacctttaccagataatggtaaattgttttaccaccagcagtatatgagttttcattgatctacatcttttcaaatacatggtgtcatcaggctttttactttttgctgacctagtggacataaaatgtcctctcactgtggtctttatttgcatctccctgataactaatgagattggtcaattttttcatctatttaattaccattctgttttccttttctgtgacgtgccttttcatgtattttgactatttttccatttttctctcattgattcataggagtacttattttgaaatagtcctttgagagttacatgggttgctatgttttcttccaatttatgacttatcctctcactttcttgatcactcttgaatagaagttccaaatgttagtatagtttatcagtctttcgctgtaactgcttttgtatcttttaaaaaaatccttccttgcatgaatactataatactattctaataatttcagtggatgggtggtttaatacataattagagctctaggatgatattaactgaaatattaaaccagtcttcaactggtattcttaaataactcatcaattggcattttactttcaaaaggcctatgtttaatttctcccatttgtcatccaggcaagatcacaagttttggacttagcttgacgaggctcaaatccaggctttgaaacagcaagtatctgaccttagttaagtaattgtccccataagcttcagtttcctcatatgtaaaatagttgctgctacaattcttctattttaagaaatccgttaattacaatagttgagtcaatttaatgggagctttttaaaatgagaactattagtttaaatttacattttcttaagtgatttaaaaatgcatacattttgccttaccaatgcctacctaccacattacttttcatcatctcaaactataagattaaatcttttctacattaagaatctaaagatctttatacagttttagcctttggtagttgggcctaatttcaaagtgacaagctctttcatgatctcttttacatttttgagatcaagagtgacatttcaaggcatattgattcatttttataaaaaatataattatcaaccacaaaaagttaaacatctctwaaaagttagctaagagcttgtgacagatggacatttagcaactgagtaatcattcttcaggtctcacaaatctgtcactttgaaagttctatgacatcttctgagggatttggtaatatctactcattttaactgtattgctgctgtgtgactggccatgattttatagacatttcaatgctaaagcaatatgcagcttccaatatcattcttatgaatatcttgttgcttttcaataagatatggaagtgcagtttttctcccaggaagaaatattttttcacttatagtaaatctttgtctcctacccatgttttaattttcttcctatatacaaaataacttagctcttcaatgaggtattaataattatagtatgaacttttgaagacattttaagtaaatagtgtatatatatatatgtgtgtgtgtgtgtgtgtgtgtgtgtgtatatatatatattttttttttttgatatggagtcttgctctattgcctgggttagagtgcagtggtgtgatcatggctcactgcaacattcacctcccgggttcaagcaattttcctgcctcaggctccagagaggctggggttacagttgtgcattaccacacctggctagtttttgtatttttagtagagacagggtttcaccatgttggccaggctggtcttgaactcctgacatcaagtgatccgcccaccttggcctacaaagtgctgggattacaggcatgagccactgcacccagccaaatagtcttaatttagttaagtgcaaagttcatcaatctgtagctatatgaatgcaagtcagaaatccaaagtccttaccatgaccagcatggacttccttgatctgtcatttccaaacagctttcacctgacttcatcccaggccactggttgatttactattcctcagccataacaagctggctgccatgtctttgcacttgattttcccacagcctggagtgctggcttactcccttgcttccttcaggccactctaccattactcttttggataagcctaacttgccagccaatgcaaaatagcactcccaaacatcacactccaacttcttaatttgcttcagtttgcttcataacactgagctcctgtatctgatattattatttatatttctctaattaaaagaaatggaataaacacttaagcatctatatatatatatttaccacttaagcatatatatatatatatttaccacttaagcatgcatatgtatatataaatacatatatatatatgtgcttaggtgtttattctgtcttttttaattagaagaggagggccagaacttttctttattgacttttttatctccagaacttagggttggcacatattaagtgctcaataaatattggttaaatggctgaattaatgttgagacaatcaggtgaacaggtgttttctatgtagagttaagagtccaacgggctattctcaacattggcagaggactagcacagttctttagtccccactgaaagactcatcctgatcattataatgttaaaatgtgatgaaaaaagcatactgttgcaagaattaaataaaataatgtatggaaaatgtttgccagaatcagaatatcaaatgttaattgttcaataaatgcaataaaattaattccatctgaatcaatccttaccccttcctttcctgtaacagtggaaatgttggcttttttctagtttgggcaaatgcttccatctgtgccctgcagttcaacgcccctcaaccccatcttctcagggacaacatattgttattttccttccttctgtcatatctgttatttctccctctctttgcatcctactcatcaactttaaaacctgctccactcagaagggggtccttttgataatgtatacaaagtcactacattgcctttaggggacactgaataagaagtaattctttatcaggcttctgcttattgctcagctgtccttgcaggtttatagacttatttgccattttctgaatgtccaatgccccacaatatctctcatctctaagttattgtctgcgccagtctctgcccaaaatgcctttactccttcatctccccaagacgtacacacattcatggtcacacatatgtattcacacatactgaaaatagctaatttcaatgtgtacttgaggtcttggcctcagattagatgccactctccctttggtgaggactcactgagctgtaagggttgaatgttcttccagcagacactacatatccgcatcagtatatctcttccccccatcttcccaaattatagttgcttatttatttatttcctctgcaagacacaaaactccttgaggatagtaattttttgtgcatgtttgtcaatgcagtatcacagtcgtcctgagaattagcacacagtagataagcaatatttttaccttgagctgacaagtggaatggtatcattagaaagttacaaaattgattttgtgatactgagcctccaactagttggaaattagtgtgctgctaaatttgcattagtgtgctagtcaaagacaaggatattcaagtacagcatttcttagtttcatattaattgcatatttctgtttatttcatattagacaaaaattactgaaaagcagcctaatatactgcgttggaaacaatatgatagagactttaatactagtacttgtactgrcaatactgacaatattatcttgtatatgtataggtttttacaaatttaaaagcctttcatatatctcaaggaaatatcctaagaacctgtttctactcaacattaaagacctaagtgaaatctgagactttcaatgcctttggatatgtaattagacaggagtttagccttttgtaacacatatgatgatgaaaatttccgattttaagctgactgttgggcatcaagatgaccatctttacaaatgaagtagcactcatgcgctcaagtatacatagaatgtatgcaaagtgaaagtctcctttaaatcttcctcccattgacttgagcaacgagaacacgtggacacagggaggggaacattacacactggggcctgtcggggggtgggakgctggaggagggatagcattaggagaaatacctaatgtaaatgacaagttaatgggtgcagcaaaccaacatggtacatgtatacctatgtaacaaacctgcacattgagcacatggaccccataacttaaagtataataaaaaaagtaaaaaaaaaaatcctcctcccattgccaagatagaaatggacccttagttactgccacttgccatctcactctgtgttctggatagaaatggtgcttgctctctgctagctgttaattgacatcacttctgccagaactctccatcattattgacaagaatgttctcccttgttaattgcccagcagcacattgagtgattgattgtatcttttggacagatttgaaatgcatttgcagaaaagggtgggggtggtaatgacataatgcatggtaatgacaccaactaactgcttatttaagtttgttcaggaaaaagatactgatcatttacctgatttttactttttatatagatgtgctaatggtaagtagtgatagctttccaggatgtcccacattaacccaatgcttcacaaaaatctctctcagactgtgcccataaaactccaaaatctatggtcaactagtgggaaaaagaatggataatttatttaacatataagcagggaaaaccaatgggtagatggaatattttacatttttgttgttttaattaaaagtaggaaatacctagattaatgagaagagtttttaaatggaaggctgggagtgctcaatattcagcagtataagattttcttttagcatagaggcaactagagtaatacataaagtgcatattttcatgagaactttgcttataagctggacttccctagaagtatttgagacacaagggcgagtcaactaatagtatctacagtgtttttgcaaccatttaatgagagagtaagtctggatcagtagttgctgatgtatgaaatcacatgaagagttttttaaaatgccgatgccttgatcctcccctagaaatactgattttatttgtctaggcagggtagtgatgatcaaactttacactgaagcagcatcttctcacaaatttggtaaaagtataaagcctcaagccctatcctgcttcatggagcctgggtctttgtgtgctggattagctctcctggtgattctgataacatcaaagtttggaatcactgctctaggttcaacatcagacattttttttcaagctcccccaggtgatattccctaggtacagccaagactgggaactgctgattaacatgatatttaggatacttcccagcctggcaggaataataaaaattgctacctttattaaacattcattgcatataaggcattgtgctaagtattatttcattaaataattgcaaaattctgtgaagtaggtaatattagtactactttgcatatgggagacagggatggtaaataatttagctaaagtaacatgggtaggaagtggtagattggaactcaagctgtaacctcaaagatcacacaagaaactattactatcaataacattttggaattataagttaaattaaaaactctacaagttggaaacatattaaatgattttcttacattttaaaatgttcctgacttgcaattacatagtaaaaacaaaacaaagaatttttaaaaatcagtgggaaatatataaaagataaagttttcatgagtaaaaaggaaggagcaaattggtggtgaaaatcaggttggatttgaattattccaatttaatctggaaaaaaattataagtcacttgtactgttagtrtatgagaaattagaataagagtttcggatagaggtattttgccacagttatattgaggcgaaaggtggcaagcatttcaggggaaagaagaaatttgtgtacttctttaaaatggttttggatgttaataatgcaatgaattaaaagaaaaaggcagtctatactgcagaacacttccatttctctccttttgtgtttgggaaaatactggcttagtgccctcctaggcatggtaaatactttgaccactgccaccagtcacacttgtgtctgcaaaaggggcaaaaagagtgcctttgtaaagtatggtttaatcctacacagtggagagtggtgcttaggagattgccttgtttctcttaagacacaacctttctcagattttgtgtatagtccacatatgagcagagggctcatattaaactgatggaggaaaggtatatttccaaccataaataaataaatagcatgaagagatgatgaaggccttctcctgccacttgcacatttcgtggactgttcttgctgataaacaaagtgagcacttattttcattggcattattttcccagtggcatctagactgtgtggagagtgttgaattttcagcagtctagagagtttgagacatggttcctgattctggtactctagcatccattacatgatatgcttgaaatgtacatatgaaaatatgttaagactgagtgtgtgggaagaatagaataattacacagccaacaagttgttgtgagtcctaaatatattatcgttcaaataatggatggtacgtggtaacttccacaaagaaaaattctagaattattttaacagtaagcaaattgcatttcatctttaagtaatatggtcaaataaaaaaggtacagggaaaaaagtgtctatatattgccctgaaatcctcttggcttctttaaaaaacatttgacactgcaggaaaatgctaattaaaggaagacaaaagttgaatttggattctagtgcctcataggactctaatttctgtgaatattgatacaacatgtttttaaaacactttagtaatagagctgtgttctgctggaagtggcagaaaggcaaattgcaggcaggcactgaagatagagactaccgaagataatcagaggtttgtaattgaaaaggtgccttaaccttaactctggccagcgggctcagccatggctctgcaactaaggacgactcgccttgatttccagcgaggaccactcccgaggccaagttggaggaagatcttcaagaggaaacattgggcattctccctgctgtgggaaagagccacacaatgttttatcctatgtcagggaaagagactgaattaatcttactattggatcttcacccagatccaatttttcagcgacgcgcatagacaatattccaggcaactttgcctggtcacattccttatctttggaagcaccagcatggggctcatcgtcaacaagctctgagaaccagccaggaatcgccaaactccatttctctaagagcactgaggcaagcggaggtgaagaggaaggctccggggcagtggggagcagtgtggaggagggaggcgcgggcacggcgaggggaaggatcaagaggacaggtctgactcctgactggctggagtggttttggtgaaagtcacagctcgggcgtgccagcctggagctgtccaacttttcagcagctccgggatcagggttccggtgccctggaggcggctaccactgccgccgccgccgttgctgctgcttctgcagcccgagttgctgacaatccctgctctcgccgccggcgcccaaaggaagggaagaagaaagggaggaagaaggaccaacctctggcgaaaccgggcaccgcgcaccctagtcttggtgacttggggagcccgggagcgtgtctctgccatagcctcggtggaaggagccctgccgcgttctgtgacccctcccgctggcagggccccctctcggtagccctgaggctctggcgccttcaagtgagaagctaagcaccagcctctgctgggctgcagaagcggcggcggcggcagcagcagcagcagcatcaggaaggcgctcgggccagcgcggtgaacccgggctgggcagcaggtcgcggagccgcgagccaggatggaggcagagggcagcagcgcgccggcccgggcgggcagcggagagggcagcgacagcgccggcggggccacgctcaaagcccccaagcatctctggaggcacgagcagcaccaccagtacccgctccggcagccccagttccgcctcctgcatccccatcaccacctgcccccgccgccgccaccctcgccccagccccagccccagtgtccgctacagccgccgccgccgccccccctgccgccgcccccgccgccgcccggggctgcccgcggccgctacgcctcgagcggggccaccggccgcgtccggcatcgcggctactcggacaccgagcgctacctgtactgtcgcgccatggaccgcacctcctacgcggtggagaccggccaccggcccggcctgaagaaatccaggatgtcctggccctcctcgttccagggactcaggcggtgagtggagagcgccccctcccccattcaggcaaagggtcacctccccttttctcaaatactccatctaagtcggcttatcaccaccaattctagacccagggtaaaatgctagtctggaaattgggggaggacaaacaggggtgtgcctatcctttattgagagtatgctattcaggtgtgtgtaagagaccccccaaaagtactgcataaatgttaactggggccgtgtgtgtgtgtgtgtgtgtgtgtgtgtgtgtgtgtggtgcgcgcgcttcccagttatctgtgccacgcaccagccctctccccacccacttccataccaccctggctagtgagactaaacaggcaaaatcagtttgctctgggtggagaagaagagaaggtgaaggttttgcgggatttgaccagcgaaagcacccagcatctgtccactcaccctattgggaagagggtcggtggggctgctctgactggggaggaggggggagtgagaaagcctggtcccaggattgcagctaaaagcctaagaacaactcgcatttctcttcgtcaggtggagaagtaaattgaatagcaaaaggggagaacacgtgggtgacttggagagtttggagcaaaatgttcagcaatccttgagagagacaagggggtgagggagggagaaggagcgaggacgctgtgggagttacactgtgtcggtgtgtgcgagcttgtgtgtagggagaccgtgtgtgtatcagtcgtccctgcaaaatcccaggaagaaagcgccttgttttagcagcaggcaagacgtagagatttgattatagtgatttcgccttaacgtaagtgctccggaagacagggcagggaagccgcctatcaaccgggagttttagtagaagttgaccgctgcttctccaaggaaatgagtaaaggaccaattacagccattctgaggagtcagctccagattcttaactcaggcgtggaggtggatgtggggcccacgtttggtccctttcctgataacccagggacagctcctttcttccctgtcccaggccttccacgccgtgaatcccctcccccacacaggcacaggaaaaagatttcaggagctgctgatccttggcacatctaatagtaaagtagaggggtcgtcatctaaccttagatgtggacaggcatcgatgtactgcacctccaagccacaagtctgaacaatgggcagttataaattgtaaatcaggtctgggtgtggaaacaggaaaatctagggctgggattgtttgtccaactctgattgacagtaggttggactgatcagaaaatcataatggtgttcaaatgtgtgtttgagttttgtgtgtgtgtgtgtgtgtgtgtgtgtgagcatgtctctctgttgtatacactatgtacaagggaatccagccaaactatcataaccctgatgtgtacacatcatttcagcttgcatatatgctcttagccctttgcctggctcacacccttaggtaccttgttggagatgttcttgtacctgttggatgggaagaataagaattgtaattaataacctcaattcagatcaaagactgcagactttcataaattaatataaaagtttcatttttcagccaagactgctaagaccctttgtttgaagaggtggatgtccttctctctcccctttggttgagcacgacactatgtaggaccccaatgatagaatgaaggcaagcctgatactttgtatatttgacctattaatagaaaaataccgtgtgatgatgagcccttaataaacattaaataagaacaagagttctagcttgatctgtgggctgattgattttgtagagtttcttaattgacttcattttttaataaaatagaatatgcctgagagagtggaagaaagaaaaataagctaattggaatagaggtattgcatcattgatttgaatttattttttgctatgctttctacattgattaattgttctatttgaaatttttagttgaatggttcacaggcaaactaagatgtataatatttatatgtagctgccactgtggctcacctgatatatcattgtcattctatttaaggatccttagacttaaaattctttacaatacttgcatattccccacatgctcacacattgcatgtcatgtttttccttaatagagttgcttttgcaaataaatacatctttaaggaggacatggatattagtttcattctttaaagagaacagcaacaatacttttttattttaaagagaacagcaacaatgcttttaaattatcaaagaaattttacatttatcaacttatttgaatcctacaacaacactgagatgagatggtattatctctatttgatagacaagaatgctgagccccagaagatgcgagcaatttgttcagtatcacatagactgtgagtgctagagctaagactgaaacccaagtctcctgcctcatcaaaggtggtgagcccaccttaaataaatgtgtgcagaacctgggcctgttgacagcatcaagaaatacatgaaaccaacgtgaagtttatatcgactgatactacaggacataaagcctgaatgaactaaaaatgagatatggtttaaatccatttttaacaaaatgacatatatcacaagcttctagaagtaattagagattttaactttagaaactctgggcagtataaactggtgttaatgatcacaacagaggcaaatcagtgtatttgttgactttgtaaaatgcatataaatacttatgaaagagtgttcagataaattaaagctagtgagaacatctaacgtctttttcaataattttctaaaagcaaacaagaaaaggtgtgtgtgtgtgtgtgtgtgtgtgtgtgtgtgtacgtgcgcaccaccatcttaccatcatccaaatggggggtttaaatagtctatcaagttaatgtctctgaaaaagcctcatgggtggatggatgaatgattccctatggattatcaagaaaggtatatcttttataaagctatttctagcatgcactgtagcatttccagatattatcttggctgaaattttgagaatttgtaacagtttgtgaagcaatgggaaagaggaatcttgtttaatgaaaaaatgtatataagcagtaaggagacaacccttagatattttgtggtcaattcttttaagtccatgggaaatttggatatgttaaataaattttttatataaagtgtgtctgtcaaacaaggtagattcatgtcttaatctcaacatgcaagaaatttcaaacaataaaattaccagagaaatgagtctctaagttaccaagagaacaaaatgaaatatgaaaaatgtttaaaacactctttaaaaatgtacatatcagattaatcatttcaaccaatagtcttcaaaatgtgacaactatttaactgaactgataaataattttattgtttctttgactttacacaacaaaatattattttcaataatataatacactaaggttgaaaatacaagcagcatggatgattccttgatattataaaatattctggattatagtgatacaaatatccagaaggggacatttgatttagatactttgtttgattcatttatttttatctatttatatttattgtttttttagagactgggtctcgctctgtcacccaggttggagtacagtggcacaatcatagctcactgtagccttgaacacctgtgctcaagtgatcctcctgcctcagactcccaaagtgctgggattactgtcatgaaccaccatgcctgactcaatttaggtagaaggaaaagagctaaaacctataatcacacaaaatataaattctgcgcatattatatttacttgacattagcttttttttttttttttttttttagacagagtctcgctctgtcacccaggctggagtgtgcagtggcacaatcttggctcactgcaaactccacctcccaggttcaagggattctcctgccttggcctcccaagtagctgggactacgggcacgagccgccacgcctgactaattttttgtatttttagtagagatggagcttcaccatgttggccaagctggtctcaaactcctggcctcaagttatccacccgcctcggcctcccaaagtgctgggatacagacgtaagccaccgtgcttggcaacattagttttttaaatatgttaacatcatatattaaataaagaaaacatattgtaatatttaaataataaaagaaattaggttttcatttttctatgctaggttataaaagctatttctttattgttttattgatttttcaggttattagtgtaattttttcttcattaaaggatgtaacggtaatctaggttcatgatgtaaaatttagatttcacattaccaaaataattaattgaaaaattggccgttcagattgtctacatcagtgaatttgaatttaggaaacagtatctttaaaaaaaagcatattggaaaactgacataaggttgacatctttaaattttaatatgtaaggacactaaggatatttaaatagcaaaaaatgcaaggaaaatgtatattttttacatttcctacatattgtcaacacagtaacacagtattagactttttaattttttcaaaattagtttgaaccttttattcttgatttgccttcaatagaatattgtcttggtaacttcatttaatactttatcagctagtgtgttctaagcctttgattaatcagaaaaacataatgaatccatcacctttttacattttgattctaaaatgatgtaccttctgtgtttcatggaaatgggaggtggtgggcagaggaggtagaagggaaaggataggaacaaatccccaagcagggaatgttcctaagtccttgtcttattctaattggatcatctgggttcagttgcccacatgtggagcagtagcatgaaaataggtaattgaccacatcaacaagacatatttctctaagattatggaatgtcgagaagagaagggactgaggcttaaactaacctagtccaccactgtccatcttttacatttgaagaaacatgtgtcatgaggggttaaattacttaacacaactagtttactgcccaaactataactacaaactatatcctccatatctgctgacaattactttacattttacacattgtggccatcttttaaccatcagtagccccaacttccaggttatagccttgaaccaaaagtttggaaattacatttaaaaaacatttgtgaataagtggaatattcaaatattggcacaagagagatgacttcagaaaacaaacattctttcactttcaatttggatacatttacacacacacacacacacaaacacacacacacacacactgatggcttgctcactgatttctatctctaaactttaatgtgggtttggaggcatgtcttgggaagagttcttaaagatcaaatagaataataatctaaaaagacttagttctgtttatgattttgctaattatttaaatgtctgaagtctatcatggacaaacttatgtccctctcacagcttattatccatctacaggtttaaaaatatgcaatatgtgagtctataacttgaatgctgctagtactggctcataacagcaacgttgctaagggattacaccaaatagcactgtattatatttcaaaagatgtggctatttttatcctgaggaacattttatctacgtttaaaaataagaaaactgatttttcccgaagaataagccactttaccttattgtttaaaacttatcagctaaattggttggaccctatattcacacataccaccattgccccaaacctcaccataccactttggagattgagaactctataaaatttgctttgtcatctaaatgagcatttataattcttgctccgtctcaacgtggggcatcacatccatccagttgtctctggtctgtggcattcttagactcttcctctcccctaactttggatctcaaagaccaccaagatcttttgaatcgtcctcagaaataactcttgtgttttttccttgccacttccctagttccagcacttatcctctattcactaaactatcgcaatagcctctaagtgatctctagctccaacctctcctcattcctgttgttcctttttttttttcaccccaggctaccaatttcaccaccatcttctaaatcttaaggtaatttctctttgccttcaagataaagtctaaatttcttagtttgactcttcagaatgttggcccagtcggtctttcttgcagaaagtctaacttttgtccccttttgtaaaccccatgaaataatcacacttaaattctggccgtggtctgagttctctgtgccttttcacacctctctttcttgctgaggctgcttcttccttctagattgctttccctatgctctgcaacaccccttccttacctgttcagaaaactcatgaatatcttttcaaactcagttcatgttaccctcttgcggatattcctacacaaagaaggaatatttttcttttctttatttttttatttttttatttttattttttatttttatttatcgtccgagctggagtggaatggcgcgatctcggctcactgcaagctccgcctaccgggttcaagcgattctcctgcctcagcctcccgagtagctgggactacaggcgcctgccaccatgtccggctaatttttcgtatttttagtagagacggggtttcactgtgttggccaggctggtctgaaacgcttgacctcgtcatccatctgcctcgatctcccaaagtgggaatatttttcttttctgggctttcccatagctttcgtatattatttgtactctagcagttatcaattgcagtttaattatttgttttatgtgtttcccccattaggtatattaggaccttgcacagtgaatggttttatatagatttttaataagtggtgagcttttaaatgtggaaataataatgaaaccttgtctttttagtttgtgctctctcagacaggatatatttgattttcttaataatctctttgaaacacacagagttagtgattattttacccattttatagatgatggaagggaatattgaatctcagaaaaatagacacatattcatgttcaaagatagaacttggacttgagccaaaaaggtctagtgatcttttttattgtaatgtaatgaaacaagagatactgtgagtataggttggtatgaggagaagcagcctataatttgagttaagattatgaagacagagtgaaattataatattatgaagagaaataacagttttgatctaacttatgaaaaaaaaaacaacatgtaagagtgaaaataactctgatgggataaagccccctttgtaaatttagagaagtgcctctacagagtaaattcttaaccttgggttatgtggctctacaagattcattacatttggaggtaggcacacatttcttagagaatgtttatccaattctcaatgagtcttttatccacaaaatttaaggcactgtgttctaaagctaagttattgactgcttcactaagggaaaaattatgagaacatagtatactaatggagtaagattatcgttggggtggctgaaagtaagcagtttgaaatgggattttagaaaaatgcaacacttcagacagataaggtcagaggcttatttaaaaatgacaatccccagtgggattttaggggattacttgacttaaaatttaatttaaatataaggatagtaaagaacattttgaaaaaataaaaagactgtttttccttataagatagcagaacatatcatataggctattaattcaaacagcatgataataatttagaaataaaccaattattcaaccaactggataaatggtcaagaataaggcccatgcatatattgaaaatttagggtttagtaaaggtagcagtccaaatcagtgagaaaaggataaattatttaatataggataaattgtttaatggtttatggaaataaaaaatgatcattacttcattcatactataataaagagcactggataaaaaagattaaaaactcaagagaaaaacagataaaggccatgaacagaaaattcaaaaaggaagaaaaatgtatgacaaatatacatttgaaaagtttttctacctgacaaacagacaaagaaataaaaactgaaacaatttttcatctatcattttggaaaaagatgaaaaatttaaaagaatttgagatggtatacagacatagccactttcttatgtacattttcagtgaacaatatatcaggaaatcaggaagtataaatcaggaaaacattggtgggtgatcaaataatatatatcaatattttaatgtgcatacttttgtcccattaattctatgtttagaaacttagcctaagaatataattgaataagtgagcaaagaaatactatattgcaatattacatataatagtatacatctggaaaccacccaaatatctttcaggacagaaattgtaaaataaatgatgatatatctgtattgagatctgtatgtattgaaattattgaaatgttattttaaactctacaagttgttatgtggaaaaagcaatttagagaatagatgacagaatatggtatcatctaccagtgtgttttcatgcatgcttatatttacatatatgagattatgtctatgtacatgtgtgcctatagttatgtatgtaggtgtatgtgtggtatgtgtgtgtatatatatatgtgtgtgtgtatttatatctatatacatatatatgtagagtgagagagagacagagacagagacagtactacatatatatgtagagagagagagacaaagacagagagagagaatacatatatattctgtctaagcaggaaaaaccaccaaactgttacaggtgtgtgaagagaggatattttgagaggtctttgattttgttttatgttctcttctcttactcaatttcctttaaaatgagcatgtgttgtttttataataagcaaaaatcatgtattttctccttttgtaaaacaatattttcaacttatttcgtttaatatatttcacttgtatttcacttgtttcttaccccccaaaaaaaagcaaaggattgcgtttcataaaaaaatttagtaaaagataaacatgaggacatcaaagagaagagaaaatggcatgaaaatagtatgaactatgaaagcaaaaattcatttcattaattcctgagtaattgctagaaacgagtcacagactggttctgatcttcctatcaactaatccaaggaagggaacactgttgctttaagattcatatatcggtaagttaaaaaatgagttgcttggtaaaatatattgctattaactctgagagttaaaagaaatatttctctgtggtgttttataaaaaagatgctatgtgatatggtgtgtgcagtttcaacattttttctatacttcataaagtttgaaatagatataaatgtttcttataactgtgactgattcttataaaactacacattgatggcctgttgtctaagttccattcattgaaaatctatcagcactggagccccagttagcattcttaacagggcattctctttaagactgaacactaagtgtgcaccattaaaagaagctgcattcttcaacttggaaaattcttctagactcactctcctgtatcccacgttcagcctcttgttctcacctgaatacccgaatttgatttggatgctgtatgtgttctctggtccttaagattaaaaactaaggtcttattttagtttcttgctcaaatattgcttttttgacctgctctgttcctgtaactgtagccctcaagcaagcccaacctaattctcaagtgtggctcagaattctgggacaccagcccaaattgggtcttccttatttgtgatagaatggaaccaaaggaataagagaggctgggcatcttggctcacgcctgtaatcccaacactttgggaggccaagacgggcagatcacttgaggccaggaattcaagattagcctggccaacatggcgaaaccctgtctctaccaaaaaatacaaaatttatccaggcatggtgacacatgcctgtaatcccagctactcaagaggctgagacacgagaattgcttgaccctgggaggcagagattgcagtgagccaagatcgcgccactgaactccatcatgagcaacagagtgatcctctggtattttttcttaaaaaaaaaaaaaaaaagaaggaaaggagaattcagtgttggtatccagctttctgattttctgacatgaacaccccattgtctcgatatttataacatatccacttccagttgaatgcaccaagataatctagttgcaaaatgtagccccattaaatacatggattgacacatttaaatataagccagttaaatgttagaagttacttaccaaaaatgaggttgatgttttagaataatttactcacagcccttctctctgaaagcaattagagtaatacatttttagtctatcgagattgtccaaattcatgataacaatattacctagtatgcaggtgtgcttccagctcacttggaagcatttttaaatcattaaaatataaagtaaaagtttggactcttctatacacacatttttattttactaccactcaatcattcccaccacctgggttttcagttttattgaggaccagtttcttgtctaatgatcagtaggcaggggtctctactgtccagaaatcatgtggttactcatcacggcagctgctactacagacactgaagaaagatcatccaacatggataaataccctgttcttatcagatgtttgagaagtaatagagtataatgatgcccctcatgtagaatatggttctaagaaacccatacttatattaactcagaaactgccataaatagctgaaatatccaaataaatcaacagacccacagtttgtgagaaacagaaggatgttcatggcttcaatgggataggccaaactttgtgttgaattatgtgcttctttatgtcttgtttcctctgcctgaaatgccttttcctccacacccattagtgttttataacacctactcatacttcagatcttgattcaagcatcacttcttttggtgaagtattttcagatctcccaaacctgtcataataccatatagtgctcctttatattgtttattatattttcaattacatgtttaattgtataattattgataaggccaatttctttcaccaaactataaactcctatgaaaataatgactctgtcaatttttctcacattcaaacacagtatttgtacattgcttgaactgaaagaattattaataaataattgaactccagggttaccaattttatgaagttaggaatatactgttaaaagtaagtagaaaacaactccaaattcagacaacctttaccatgtgctttattttattaaagagttaaaaaataactatacaatttattttatgtaaaagacacttcagtttacaaatgcaaatatcacctctggaaataaacctaaaggacaggaagtcattgaagaagtggcaccatggattgccaggatgatgatgttgcaggagagttatatttaaggagacggcaaataaaaaaatgataataaggacattagatactaatttcaatgttattttgtgttttgtcttatgattattttagtgtttatgcattatttaacatttattaataaattataaatactctggctcaattcattctgttagcttggtttaaacatatataaaatgcccacagctactcctgttattggcatctggtagttctgcatgacattaagacccaaaagtaaaaataaataaatttcttgactgagaaaataattgccaattcaaaatggtctactaaccttaacattcataagaagaagagtatgtatcatcatcctggcaaaatggcacttataatttcataaatgctcctttttaactttatgtattatttttattttgggggtagtaagatgtggaagctgttagatagtcattacttctgttgacatggaatattttataaacatgaaatatttcacaaaaaataaaaaaccagtaataacaggtcacatacacactcaataatctcactatagcaatatttcagaaaaaaatgtatttagggaaaacaatttatgtctgtttgtttttagtggcagtcatgacatgaggaccccagactcaagtgcattgccatttactccctggtagaatgtgatttcatttccaatgagctcaaacataatgattatatgtcttactaattatacaaaacatggtgaagaggtagtgtgctttgtgatgtcacatatcaaaaatgctttcttttaaacatttctatctccttagctaggtttaagagataacaagatgggccactgaagtaactttgtcaagcatgttcaatgtaatatttccccagagattgttttaactgattcgaccaaattagattattgacttgacaataatgaacaagatacccctttgaatttttgtcactacatctttttgtaactcatgaaaaatttcaggccaggcacagtggctcacacctgtaatcgccgtactttaggaggccgaggcgggattattacttgagctcaggatctccagaccagcctggacaacagaccaaaaccctgtctctacaaaaaatacaataattagctgggtgtggtggcgtgcacctctgattggtcccacctactcaggaggctggggtaggaggatcgcttgagcccaggggttcaaggttacagtgagctatgctcctgctgtgctgcgcaatccagcctgggcaaaagagtgagacctgtctcaaagaaaaaaaaaatcagaaatgtttgaacccataaagtagataatgaggacatagtgggagtatgtagaaaagcaataacaggccaggagcagtggctcacgcttgcaatgccagcactttgggaggccaaagctggtggatcacaaggttaggagtttgagaccagcctgaccaacatggtgaaaccctgtctctactaaaaatacaaaaattagctgggcgtggtggtgtgcacctgtaatcccagctactcaggagactgaggcaggagaatcgcttaaacccggggagcggaggttgcagtgggcagagattgcgccactgcactccagcctgggtgacagagcgagactttcgtctcaaaaaacaacaaaaaaacccaaaaacaataacatatagcagtgttggccctcaagcagtctggcagcctttttattgctttggatgccgtttgtgtctaagcatttgctttaaatatttgatgtagttaattaatgagtattttggatcttctattatacaaatctgcctatgaaaaataaatgcaaacaaattacaaatttcaaatgatagaagaccaaacggaaatacaacgataatgtcctcaaatgtgcactagtagtttaacagaatataactgccatctgattattaaacagtagaaattgtttaagtagatagttaaaaactgtagtatctaatggttagtattttccaagacagtagcctaagagagtagttcaatatatacggagttccggctgtggaggatggggctggtaaggaaaagcaagaagaggaaataaggctttgctaaagattccttaacttccctataagatgttacagaggcactgattggttttaagcagggaaattatgtggatagttttgaattttttaaaacttactttggtagggccgggcgcggtggctcacgcctgtaatcccagcactttgggaggccgaggagagcggatcacgaggtcaggagatcgagaccatcctggctaacatggtgaaaccccgtctctactaaaaacacacacaaaattagccgggcgtggtggcaggcacctgtaatcccagctatttgggaggctgaggcaggagaatggcgtgaacccaggaggcggagcttgcagtgagccgagatcgcgtcactgcattccagcctgggcgacagagcgagactctgtctcaaaaaaaaaaaaaaaaaaaaaaaaacttacttcggtagatatgtagaccatggagtgggaagaaattaaaggtgtgatttaggtgtttattgcagtaaaccagatgagaaataaatggtgatagtctgaaactgatgctgtggcagtaaaggatggacatggcagtaaagagatgaatttaagagaggttttttttaaaagtggaaatgatagatcctgtcgactgactgacttaatgctattagataaaataatttttaaattacatgtatttccaaaaagtacaattaatgaatccatggccaggcatggttgctcatacctgtaatctcagcactttgggaggccgaggtgggcgaattgcttgagcccaggagttcaagactagcctgggcaatatagcaacatcccacctgtatttgaaaaaatagtaagtaagtaaataaataaaaatccataagtatttggacacctaaggtaaatttaaaatcttgcagttttgttttcctttgttctttgtaatttttagcttgtttgagtgggggaaagtttgaaatattgggtaaggcaaacatttgaaaaygctcatctgcagaggaaatttgcagtgttgtggatagatcacttgtgtcaatacgtgaagcataacaaatgctttttgattgtgaaagcataggtagatatattgcatttcaggtcaccactaattaattgcattaatttagttaaattggttttctcaactcatctgaaaaagatgaaaactaacacttcaaactacttcctcttggtaacatcataaagacaaatgaactttctttttcagtcatttccctccttcccctgttctgccctctctctctaactaggaagctactacaccagcctttccagctttggttttctaatcttaattatttctgtacccatctatcactggaaattcttcaaacactgatgtgtggatgtgtgtgtgtcgggggttgaggggtgagtttggggagtggtgctgtgtgttattgcaaaattatcctttttttgctttatctttaaaaccttttggaaacttgtctaaacttttctttctcttttttttggcagaatcttgctttgtcactcaggctggagtgcagtggcgcgatcttggctcactgcaacctccttgtcccgggcttagctgatcctcccacctcagcctcccaagtagctaggaccagagttgtgtgccaccaatgcccagctaatttttgtatttttttgtggagatgaagtttccggagatgaggtttcacgtgttgcccaggctgctcttgaactcctgggctcaagctccgcctcccaaagtgctgggattacaggtgtgacccaccatgccctgcaaacttatctaagctttttttttgttcttcttcttttttttttttttttttttaggttctggcatacatgtgctgaatgtgtaggtttgttacatagatatacatgtgccatggtggattgctgcacttatgaacatgtatgtttattgtttaagcttttttatcctttttatcaattgtatgtttttaaaaatctctgccatgtgcttttgcctctggctaattctatctgcatagacaccataataatctgttaatcacacttaacaagcctttgcatttgatatacctcttacaaacaaccaaacgaacatgcaggcaaaacaaaacagcaacaacaataaacacttcatagtctttcttttgcttgtttctctaggatgactattcttaagacccacacctgacaagaataattctttaatttttcattttcttagaatcaaggtattgtgttttcatgtagagttgtaaatatggtataagcaaagatacttgctctcaaaccaggattttatatatattttcatattttgtggttctatgtatgcatttttggctctaaatatttgttttcataataccattaatgtgtaggacaattactatgtatttttgttgttgttgtcctatccttttcctttcccttcatcttagtattaggataagtatgcaacagtaattttccctttctatgagataaaaacttctacatcttcctaagataatattactgagatagccatttatagatcattatttaaaaagactttttcatagtgcattgacatacactatcccaattgttcctcatatagaagagttttaagttgaagagaaacataatcaatgtcctctagaaagattcctcttgtagtagcatagaaggggaataaaaataaagcaagacagaaggtggggggagtccagttgagacattatgataaaaatccagtatagcagatagagtcataacttagagcagtggaataaataggttgatattattaggctaggtttgtccattcttagcaatcaattagaaaaaggcaggtggataaagaataaagagatggaaatcttaaggtatgtactcagccaactgggtgagtgatggtagcacttaccaggtcaggggaggaaagctgaagagtttgctagtgaacacacaaatagaaatgttcagtagattattgtcatcatcatcatcaccatcactatcatcatcattatcatatttcctcagcactatcatttattaatttgtgaggcttggtactcctagaagctttgcacagatcacagttcacttaatcttttcaacagaccgtggaaaatatacccttttctctagatgcagacctggaaaatggaacttagaaaagttatagaatatatatgttgttgttgtccttttaagctcagtgtacatgtgcaggatatgcaggtttgttacataggcaaacatgtgtcatgggggcttgttgtagcgattatttcatcacccaggtattaagcctagcatctattagttatttttcttgatcctctccctcctcccaccctccagcctccaataggccccagtgtgtgccattcccctctatgtgcccatgtgttctcatcatttagctcccacctctaagtgagaacatgtggtatctgtttttctgtttctgtattaatttgctaaggataatggcctccagctccattcatgtccctgcataagacatgatcttgttctttttttatggctaatgctagaatttttatgactccaaagttcaggttctttcaatatatcagattttaggaactcagaagaattgagagaatagtgtggattggttggaagttactaggaaaatatgatgagcatcagaaagaacacctaaataagggatgccagtggggaaaagctcaaggatggaagccagaggtgcaccatttaaagtgcaaggaggaaaagaggagtcagtgatgggacctaaggaggaattctcactctgtgctttttcaagcaggatacagattccttcttttttttttttttttttttttttgagacggaggtctcacttggtcacgaggctggagtgcagtggcgcaatctcggctcactacaacctctgtctcctgggttcaagagattctcctgcctcagcctcccgagtagctgggactacaggcgagtgccatcacgtccagctaatttttgttatttctagtagagatgggatttcaccatgttggccaggatggtatcaatctcttgacctcgtgatccgcccgcctcggcctcccaaagtgctgggattacaggcatgagccaccatgcccagccacagattccttcttgtgttcatttgaaatgtgaactctgaacaaaggacagtttatcttggatagtcttattccatgatttatatatcactaaaagagcagagaatctgtagatattataagtgggatccttaataattaatatatggaaagagaagcttaccagataccaggatttttctgcattgcctggaaaaggaggatatctgcaaacttttgtaccctgtgcacttatcagattggacctcagatgggacctctgccccacagaatttctctttaatgactcattgcttactggtctaagaagaaaaataattatagcctcaggttagaaaaattgaaattgaatcatttcacagtcagattaatgctccattagtcccatctatatgaaagggaggagggagtcaccaagtcaggttggaaattccttgggatgattgaatgtaagggagaaaaactgtgataattgacatagtcaaggcaagaacccagttccgaagcaaatattttctttgtgtgaggaaagggtacagtattgctggttcttttttacatataatattactttgtattctcccaatactttatttttttttaaaatggataagaaatcataaccagtagagagagtaaagaaacacaggtctattttctttaatgaatatcatcactcttgagttataactctattatctacagtcttgttaagtgaaaattgtttcctcaataagaacacttttttatagaagttgaagttctcttctggcacacattagaattctccagtattcatatttcagttttattcatggtgtcaaaaggaattgatgtgataaaatttccaataatgcaatgagaatattcacgtttgtgcaaataccatggagatgttgagaagtagagtgaagggacattatgtgaaaagtaacatctcactggactcaccaactctaaatcttacttttttcttcagagatgaggtctcactctgtcactcaggctggggtgcagtggcatgattatggctcactgctactttgaattccagggctcaaaggatcctactgcctcagcctcctgcgtagggagccatcatactcggccatttttttaaaaaaaaatttttctgtagagacaaggtatcaccatgttacccagactgatcttgaacccctggctcaagcagtcctcccacctcagtctctcacagtgctgagattacaggtgtgagccaccatgcctagcttaaatcttgcttcttatatatgcaattattaacaatagaaagctgttttgtattactagattacttggtttttcaaaatttcaacaactctttttgatttttaagaatattggttagaatggaagtattggcataagtcactagttttcaaaaacatacccagcagagttgaaagcgaatgtaaaacgccatggcctgttgattctatcatcgtatagagtatttttctgcttatgtacttttattgttttggtttagagacatgtatgatttattacaccagtattttaaagcacattctccctcttcatttctgcaatgtactgtgtcgaaccaacttcataggtaaaagttgtaaaatattgctaatttcacatggttcagcctaatagaatctcatgcccttttaagccttggagaaggaaagcctctcatattgtctccttccagattcttggctcaatccaagcttctgcatagttggagtggcaaatcccactcctgcatctggtgagctgtgcagttagcagctctgacacttttctacgctgttcaaacaattacagccccaaaatgtgagtgtggccttaaaaaaggctgattccatgtgactaccagattgcttcaagatctgcccagtcatccccctgactgtgtcatcccttaaaaatctgtgtcatctgggtacagaaaattagaagaatgttctcttgatctctgcttaaattttcagaatttttcctttgaaaccacgaactagagaattggaattagacttaatgacttgactctatgtagtatatatttcttttctccaaacactgttttgtatacatgaggagggacaagaaatgaaggaaggggaaaagtatagcgtttcagccccagaaaggtacctttcacaatgtaaatgcagagtatctggttagacatagccattttgctcacaagcacattcagagatgaagacatgcagtctctaattgtttcgttgtatctaagagggtgaaaatagaggtggcatatgaaaaaaaccttccattttcattgagcgtacccatattctatggcatttcttaccagtcagtaggaattttttttcctactgatcagtactactgaattacccaaaggcaaaaatattccctattgtttctttgttttctaactttgttctctagcttctaggtagatgttaactttttggtatttaaatgtgcacactccctgagaccaaactgcctcagcaagttttacttcaatattaatgggcaagatgaatattgtttgatgtttcactgttagcaaaagggaggagaaagaactagaactaagttcaattgaaccattactatgcagggtctatacagtcatgattattatctcagattccaaattctgttcaccaaaaattatgattatcaaattgttaagatagtaaattttatgtgtatttttaccacaataaaaagttggaaaaaatgatttgactatatccaagtttgcagagttggtaagtagctttttattgcaaaaaacttgctgatttgtgaaagaaccttcatttccaaattaggaataatttcctgcaaggaaagactatgctgtgtgtgtgcctgtgtgctcttgtgtgtgtgtgtgtgtgtgtgtgtgtgtaactcttctgttgtgaatccatcagtggttttgcattgtttacaggataatgctcagaatccataacaaggtcagtaaactcatctatcatttcctaggcatgtctgttatctgatctctagcctttcttctcccatcgtcgccaagtttagttctacttgacttccttcacttccttcccattgacctagggagcacctctaagactgaaagggaagtcgtgggcttggtggagttgaggtggggaatctatgaacagataaatcagatagaagcattgtttggtagaaagaagagctcatgagtggcagtagagattgagttaaagagtgggatgaaaaagaatcaaaaggaagtagtacgatttggtgaccaatttgttagaagggatgaggggcagtaagtagtcagtgatgaccccgaggtttctagctggacctagaattgtccaactagtccaaaaatgaaaaaatttgcctttaactaagatgagtttgacaaaagatgaagtaaatttgagggtgtaggtaatgaaaacaagttggctttttctcccttgatggcaaatttcagtgtgtatggatgtatacatttgtgtatttgtgtgtttgtcaatacccattgatttttcttaggttatattcaaatactgaagttgtactaattaagcaaccgaagtgtatgctttcagcatggtacctttcacacagcaccaaacatcattatattattttctattgtagcataacaaatcacaacaaaattagcatcttaaaacaatacacatttgttactttacagtttccatgggtcaggagactgcacttgacttagctgggttttctgttcagggtctcaaaaggctttaagaaaggtgttggccaggattggggtctcatttgaggttctggctcctttttccatatcaggtggctgttggcagaatcaatttcttaaccactgtaaaattccttgaagcttgtttcttcaaggtcagcaggagaaagaaactctgacttctgacttctaggccattttttggagagctaatcacttgcttagaccagaccaaccctgaataacctttgattaacttaaagtcaactgattaaggatgctaattacatttgaacaatcctttaactttgccatattccactggttaaaagaaaattacagatgttgaccatctgggaggagatagtgtaagggcctgagctattggagatcatcttagaattctgcccaccacaatcgtgttctatgtttatgcaggtatatgtgtgagtgtgtatttatgtgtgtagttaataacttaaaaaatgaattacatgtatcccaaaacaagcggcaactgcacatcccatgccttcttacttggattagtttttcctgaagttactccagggtcctgtcttcccattgttaggtttcctttctgctgtcctggcttcacctttcgtagccaagaaagcactaaatttggctctgaaatgtacatttcagtacaatctccctgtcttggcagcagtggtgaggctttagcaaatcgtttgtgatcccaaatgagcttcagcagtttggagtgaggccatggcccacatgtttgatgccaccagcctgatttttgtaatgaaaactatatcaataaggtaagtagtcccttcttaggcatgcattcttttccaattttatgtagtggtcagtcattcttacagtgatacaaataaatatttatgctttcatgtcttttaagcttttagcaacgttaaaagaaaaggagtctgtaatgaatgaaattgtcccattgaacttattttttcagcttttgaggatatatcgagtgtacttcttaaaactgaacatgtgcatttgttacatttatatatgtttccacatatcactttgtaaaagaattagagagagcttatgaaatagaatttaagttgatttggtatgagcaaaatatattgttggaatgaagcaaaggaaagaaagcataagagccatcatagttaattctgtttaacttgttttaactctatcaaggttgggccaatgtggcaatttattaaataatttgctctcattaatgcaaaagaagaaatgttccttagggaaaaacatgttgtcttgggtacaaaattccagcaatgttttttaccacatgagactttatggaaaattccagataacagaccttgccctaatggtatgtgggcaacaaatccagaagtatctatcatagcattctttcttataacaaattttattagaagccaaggctagaatgttgaagctggactccgggcaggtgattcaaatgccatactattactttcctagcatggacagttctggttattaactcactcttacataaaacttttagaaccaaaggattggagggatgctgacattccttagatatcttaggtaataatcctgaaaattcacttttcctgaagtttttgatagcagatagtaagaaaatttcactttaaaactcactttgaggacctgaaatgttatattccactttgctgattgaggtcaaggactattgtttgaacctcaaacaagcaggtggtgaggttcactttcaactggtaattacgagaaaacgaaccattatgctagatgcaaggccacctcatcttgcatccggtaaacatgccaacaaaaacacaaacaagtgtctgtaatacctttcaacagctccctgttgctctcattataaatatggaaatccttaccatggcattcaggaatctgcatgatctgatgcatgtgtatattgacagcacatcttgtatcattcgtgacatcactctctattatttggctgattttgacctaattcagcacttggaaaccaccatactcactcctgccttggagtttttatgcatactgtttcctctacactgaataatacctccaaaccctaccgtcactgcctattaaccccctacttctcctgtttctcagttcaaatctccctttttctgattatgtgtctctgattctccaaatcttgccagttggccctgttagggactctcagagcttactgtagttttatttcatccatagcagcttatgagatttttttcattaatgtctattagccagatcgtcagctccatgaaggcaggttgcaggcttgtttttctgaccactctatcatcaacccagagcacaataaatgaacataaagtgaattcaataaaaatgtgctgaaaggataaactactgttatttactacattaattacaacttttgttagccccttacaaaagatgctttcttagatgctgcatttcccattctacagaggttgaataatatgactatgatagttttagaggagatgggaaatagtttggtatttcttaaattaaaatatgaatctgttagagctagaattttattttctgaaagataatcttgtttagccagtgtgagaaactacattacacaaagaacattttgctagtattatttcgcaggagaactaaacttggtaaactgtcgttcctagaagattgtttttatcaggcaccgttgccttctttgagctttatgaactcatgttttaggacagttagacattactgatggagttagagaatactagaaagtgaacttcagctaaagaaagtgatcttttttctctaatggcaattcagttgcaaagttctatttttattctaaggggctcatagagggtggtccccaggattctcttaggggtctgtgagaccatacatattttcataataacaccaacatgtcatttgtaattttcactgtacattttctcagcagagttctccagaagctatacaatgtgatgcatattatttcataacagattgaatacggaagcagacatgagaacctagatgtcttccattaggtggcacaaataaaaaacattgtcactcttctcacagttttttggaaaatagttatttttaccgaaaataaatttattatattttttgaaaatgaattagtaaataaatatttataattgtctcagttttaagatggcaaatattccacataaacaagaaatctgtgagtcttcaataatttttaagactataaagagattctgatacccagatatttgagaatcacttctccgagccattttattgacacaattttacttgactttgcaacctgaccgttttagataccttttctttccagtcttttctaaaagatcaattgattaattgggttgactcgatgatacaagcacacgatcttcagtatcaaaagatactcatgaccagtaaacccctctttagttctcaattatccaattccctttcctggaggcaactgctactcttgtatttcctaatggagatcttttatgtgtttactcaaatgctaagacataatatatcatattctgcttcctgcttatcttccctaatgatatagcaaggagattgattcctaactctgcatgcaaatctgccatagtgcttttagcaattgcagtatcgtccatgatctggatgagacataatttcaccagactcctgttggagtctgttggattgtttcccatcctttgtcactacctacagtgtagtgatgactattcttttacttatttgttcatgtaaagtaaatatatctctagaattaatatttggaggtggaattcccaagtcaaaggaaggaaatacatattttttaaaaggattttagtagattgttctgaaaaaaattacaccaaacttaccctcacatgactatttttgctttttctcagtatactttttaatagattgcattataaaattttaatatttaccatttaaataagtgaaagcaatgtctaattgcagttttaattttatttttattaaggaagttaatcttttttttttagctgaagtcgaaaaatatgttcatctctttttcattgaagctcattagtttccaaaaatgtgtcctcatttcatacaaagtatctttgaaccattgccaggtcatagaagtgactcttgaagatcttcttctctgggatcaagggtcacatctcgttctcctggcttcatacccttctctctctacacatctcaattaagtaagcttcctttcttatcctctgaaattataatcatctttaggctcccagatataggtgacctgtgccatctagtctgacttccagtttgcaaattatcttcaaaaagtggaaacagcttttactttctactttataaattcatacgtgctcaggaggacttttattaagattgggacatattgcttagttagtctctagggtggaatcataattaatgaaagaactctgtctgatggaaggcttagtctaacaaatcatcctaaaacttcattagacattgtgtaatccccatggacactgttgaagagacacttgattaggcagatcgtgacaacttcagctttgcccatcatacatcctccagagactcctcaaactcaagacagactttctacaggaaggaatggctgtttctatttcagaatattactgataccagagctttgctgcatcttcatgtactttcctttatttttatttttatttttttacagacaaaatcttgctctgttgcccaggctggagtgcagtggcatcatcatagttcactgtcacctcaaactcctgggctcaagtgatcctcctgccccggccttccggagtgctaggattacaggagtgagccaccacacccagtcttcatgtactttcttatgtaaatttattttgtttgagattttctttgtgatggaataagcaattccttccttaactcatttcccgagacatttttggaatttgcaatatatatgaaaaagcacttattctcagtgatggaaacaccattatttcttttactagaatgtgatcttctggttttaatatttatgtctctgtgccaaggtgaaaatattgtagaaatgaaagtataatgagagagaatccagataataagattttcaataaacaaaaaaagaagtatgtataggagtcctgtctgctgcaaattttaagaatggttttctgtcaacatacagttgtcattgcttactgaaaacttctataaaaaacaagacacaaatgattgagaagatagtagagactgaaactagaactgttgatttaataagctttcttactcatatacttaatccacagtaaattattagcaaattacattttcatagtatttcagaattaaaagatcatagtcagggcttaaaggaatccagttgttttaacagtgctggaggcaaagcgttctagcagcaatcacctgtcagaatgacttaggttggattgtttgcaccacacactttactatagttacatgtctttcatgtccctttgtatctctgactcagtttcctcatcagtggtaatagcagaacttacattttagtgggaggattaaaataatgtacatgaaatcaaatatataagtcagcactcaataaataatagtttgtcatcattattactatagtaaatgaccactatctgaaatgggatataaaaaggaaagtgaaattactaaataaatatgagcgtacaaagacctgacaatttagatacaatatactcactctgtctcaaaatagtgtcttctgaagctttagtcagaatattatggtgacatttctgctagatttgtcattgagttgctgggtttgaggaagaacctaggctacacatttctcttggctctacaaaaggctgtggcagtgggtccctgagtaaaccaccagaagaaacctaaggggcacctctgtttttcagttaatcagttttagctcaactgggatttaatcctgaaaatctaaattacatttacagactttaagttattgtgaatatttacactacatgggagaattaccaaaatatattcgttactcatacagttttcgaaaaacaggtgagacatcttccagttaaattcatcttccttttatgtttaatctattgaagaattctaaacattgttttgcaccaaattgctcccttaagttttaagagccacctagtttgggcatcagatgttctcctttatttctgtaaaaatcttgcaaattcactcccagaaagaaatgtagagaatactaggctatttcacagaaaaggcttgctgccctttcctgataacaaggtagttattattcttggctgagcctgtcccagaaagagtcttaggtgacctggtgtgggaattgctaaatctcaggctactcactgagactgtctgctgctgtgctgggcactgcagtcctccagagcaggcctgtcagcatcctaccgtgctctgagtaggtccactggggaacctggtggagtgacatcatgtatcagcctctagcagcaactcctctctgtagccccatgtctttcctgtggtacaaaggaacaagtgctacagggcatgtctgtaatcgttatcccaagggcacgctccacaggcatctaagggtgaaaggtactgccagtctgttgggtttgttatttccatagagctacacaggaaataacaccaccaaaaataacacattcaaactcagagggcaatcttccctaactattcataggcacacgtcaggcattctatacatatacccagctctttgctaagcatagtgaaatgcccttttacattgcaattaattattagccaacattgaataattattggtgagagggtaaagggcaagtgaaataaaaatagagctggtttatttttaggaagacactattttaatgtgttgattaatcagacaggtgtttaaaagcatttgttagagtcaattcacagaaaatctcttttacatgcaggttacagccaaagaaagaaataatagccaacacatttacgatttcaattgcaaaaattgtcatatttttgaacttgtgtgggtatttgaaaatattagctcctactaggtccagttaaagcttttaattctataaggtttcagactaccagctgaccactgctcagcatcccctggactccaagggtttcatctaagacatctaaggagaatgtctacccgcacatcgcactaatgcccatgactgcactgcttgaaccatgaggttattgaacagaaagcaaatccttttctgaagagcctccaagatgtggatatttcagttaatttcagctccctgccagctcagaagaatgatgctgtgctgtgtgctgttcccatgaatactacacgcagggcactgctcagtgactcagccttccagggagccagtcagggttttgaagctgcatcgtccctttcatccttgaagttcttttggatttcatcaatggcatggagggatatttttaaaacaatggagatttttcaggactggcaaaagggctcccctcgtcacagtgccaaaaccatcacaaacataagttatgttaaaaaaaatcctaaactaaaaatatctggtacttagggaactaaaagacatctcatgtttgctatcatttccatcagagctcaggtcaatggacagagatcaataccaaaacaaacatgcatacttagagcataaattcagataaatgctggagaattaacatgtagatagaagtaccatcatgcctaaaacaaaaactcagtccaatggttgtttcagtgaactgactagccttcatagagaaaagtttattcttttcaaactgaagttaaaagatattcggtgcttcattcgaaattttctatttcatgatttttgaagtagtgatttagaactctttaggactatagaaaatcatttttcttctaaaatgttgtcttagtcctaaattagaaaaaaaaatagtaagaaattaacaaaacaaaaagttaatagtattattcacatatataaataatgggccatcatggtatctgattttgataaaaggaaaatatactctgggattatttttccaaattctggcactctatttatgagtacctagacagacactagagtctcatggaatttagtattagaaatgctactttggagtacatttgatgtcattcaagttaaaaaattaaggaagtagattttcaaaataggtagcataaaatgtaaaattattgaatgttggagcaagaagatcatctaatgccctagcagttcttaatgttgcttgggtcatggatcccttaagaacacgataagagtttaccttcttcctccctagaaaatatactgctttttcttttataattaaaacaataatatgaaagttaatcttagtccagaagtcctaatagcccaagaatagaaatgtcaaattcatctcatatcattagtttgtaattttccgttgcccttttaattccaataacacagaagctgtaaaactgcttgtcatctgactttttatttgtcattacccaattgagcttcttatattacagataaggaaattgaggcacagagatattaagaaacttttccgcaggaaaaaaaatctgctagttattgagctgggattcaaattcaggtagctgattctagtgtgcatgtgctaaccacagcacatactgtggctaaccatgcctacactcatgctcaaaactacgctgtgataggtcttattagcatccccattttacagacgtggagattgaggtgtagagtggttaagtgacctggcaaaggtggcaaaactagcatcacagtcagccagtctggttccagaggtaggaactaaaccaacacactgcccttcacatgcctgtgtgtgagttcgcacacccacacaatacatgaatttgtacatatgtatcttagaggtcagggtaagctgaggatacgcatgacaaatgggattagatatgactttttccttctttctttcttagttttctaattattttgttttaagcaagcattattttggaataaaaattataaatattatttttaaaaagcaaacaggttgataacttaaaatgtgttagctggtgaaacgtccagccttatggagtaggcccctgaggtatagaaatggttttgatggcataggatgtagccttgggaatgtcctggaagagtaggagcggccagttaggcattaacactcaggagtaaggagactgcatttgggatgctcagctgattggagggtggtgttgagtggtcccctgggcagtgagaagagaggccaatagcactggcacaggaggacaagcaagttgttctaagtaaactctcaaatgaactgagagataaaaactctaaatttggactgcttcacaatttgcctaaggctggccctactcaggcctttgccagctgttgttttcttttaagcctctgatctgcaggaaaacagtcctgatttcacaaagctttaacagaatttttataaacgcagatttggggctccatatccacaaagttttccatcctttattttgagaatctgcatatttaacaatgatcctccccaaggaactgcaatgcaaatgtccaaatacagtccttggtaatatgtgttttcacagggtgaagtttttgtccaacactgtgagatgagagctgggggaaaaaaaatgaacattaaccatagaacaggaatgcaaattttctgaaaagtagagcgctactcctctcctctctttttctccatataattgaagagacactcaaattgattgttttcccattgtttcgaatggttgctccatgtaattactgaactgaactggtagtttggggggaataggggaaattcagagaatgttgtgtagaagtagaagtctacctatgtcaatgacctattttagcatttttctctattaactggctaacaattcgcttggaaactcctccagctgaggctttgttaggctttgctgaaaataaattaggtgactcattaaattgttgctggagttaaaaaaaattaggcttattgattcttaaatttctgctaaaaatgttgctaaattaaatataggttattgtctttatcaaaacaaataacccacagcttctgtattgctttatctgtattcaaaagtttgggccgggcgcagtggctcatgcctgtaatcccagcactttgggaggctgaggcgggtggatcaccagaggtcaggagttcgaaaccagcctggccaacatggcgaaactccatctctagtaaaaatacaaaaaaaaaaaaaaaaattatctaggtgtggtgttcgggtgcctgtaatcccagccacttgggaggctgagtcaggagaatcgcttgaacccgggaggcagaggttgcagtgagccaaggtcgtaccattgcactccagcctgggcaacagagcgagactccatctaaaaaaataaaaaataaaaataattaaaaaaaaaaagttcgaacaacaaggttatgttagcatttatcagaaactaatgataatttatgtggtattaagtagggtagtatcttgaatgagaaagaatactgtagtttggattctttggaggaccttcggtttatattttatttgcaattatgtttatgcttattatttctgcttactttgtgactaaaagccagttaaatgtgattctcagatttcattttcagtgtttttattagaatgtggtcttttaggatttaaacctattttcatcttgcaagtatatattttaaaagtgattcatttaaatattctgctcagcaattagcacaaatgttgtcactaaattattacaatagtagctattaacttcaataagtaaaataacagttccctattgtataatatatttagaaaaaaatcacttagtggggtgcatgtatgtggaacaaggtgaagactacctatctcatcacagaattcctcaattaagaagaaagtgctcttaattacatccaatggcatcattttcatgaagataatcaataacaagtgacttatttcagtgtctcaaattttcaagtttatgcatccatctacttcacagcatccatctccatgggccccaggctgattcttgttatccttgctcaacctatccattctcacagtaaaaagccatgagagccattattttttaggaaatgtgacccattatccccaaatcactgggaaaatcaccttactcgacgggtccttatagctatccctaatatcttgttgatttctcctttaacctttttactatgccaatgaaaatggagcaatgtataactcaataaactccaattcaactgtcaaatatccctttcttcccaaattctgtttaagagtctgtgggcctcttccaactacaatccctgcacacccatccttagcattagccattgtacttttagaggaccaatttgtaaacttgatcatatcaatcttgaaatctaggaacaaagaaccaaactgataagctcttatatccacactcaggagctcatcttccctgattaccttgggctccaagtaccactttcatgagtgcctcacttgtgtagaatctcaccatggtacagctcatcacaccattttattatccagcagtggaaatgtaaattcatatccttttaacactcacaaaaggagtcaatttcagtcaatttttaggaaatttggtgaaagtttagttggttattatcctgttcttcaaaaagcacatcattagacatacttttaaaaaaccagagaataatcttaccttataaagacaaatgacacatgttgctatgagtttaggggagggttactaaccttattatcatgtgaactgtttggaattacctttgaaccctctatacatggatttctgtcggaggcctaagaactccttgtcaggagaaggaaatggtagaaatcagatgaatggtgaagtatgaccattagaaaccaccctctatacacctacactgcctatttttacatcaaacatagcgaactgtcctttaggaagcagaaaaggcagagctgaggaaatgagaggcacctctcatgtctttaagaaaacaactaagtggcaatttctggaaaataggttattgtttgtcaggtattagcctgaaattttgcttgaattgtttctccctaggaaatgaaagatgttcacttcttagttgttttggaaaaacaaatacttactaaagattataatggctatcaatttaaacaaacagatgcttttagtgtctttgtgaataacactagtgaatttgcaagaattattgctttaccaacaaagcataaattcccatgttgcttcagtacttgtgcagtgtttgttctggagcctctattcaatatcaaccagcgtatagtagttcctccgtgagagtctcttgtaaaaacttacattcattcttgttattattttatctgagtgaatatttgacaaagaccaaagaaatccccttgagactggtacccattttctctaatttgaaagatattgactaattttgttagatcccaccatgaaggcaaaaggaaaatatattagctatcactgtggcttaaaacaagaaattatttattatttttaacaaatctgaggggcaactggtgtttggttgatctatgttgaacttatggatagttatgtgagtgtcagatagaatcagacatctatgtgagctggcgcatctccattccacattctctctcatctttcttctgggactgatgagcttgcctgggtgtgttcttctcgtggagatggaagaggtggaagaaaacaagcccaacacaaaagcacattttcaagtctctgtcatgacagttactgacatcccgtgaatgagggcaaagacaagcagtggggcaggtcctcccacccttgatgggagggctcagaatgaatacatagatgcaaggagtagggatttggggccagatgatacatcctaccacagagaggtaggatacagggaaattctaggccctccagtccctttgctccaaataatcaccatagttgagacttgaactatgagagcatcaagtaggaatgccaggtgagcttcagctgctgcccaagtgtctaagaacactcattcacctctcagatactcacatacctatgaaatgcaccaatttcatatcatgagccaaagtaaaactcagaatcattgaaatatttgtctttgcatagaaagagtcccatatggaaacaacccagcctacctgcttgacttcctgcctgcctgcatgcctccctactccctccctccctcgctacttccttccttccttccttccttcatctctccttccttccttccattctccctacttcctgactgcctatgtgctttcctccctccccccttccctccccccttccttctttccttccttccttccttcccaccttccttccttctgctctccctcctttcctccatttctccctctctcccttatatttcttcaattcttatcatttgagtatctagttaatgagttctcatttgatgttatagatttttttagctcttcctcacctgtattccttggagtaaattttatgaatcttagaaacagagtctggctgataaatttattggtgcatcaaactcattgagaaatgtcttccagtttcatcttccaaaatgttactagttctaaaggtagtggttgatagttcacacaaaaaaatcaatactgattcagaaataacttgctcatcagggaaataaacctggaaggttttagtcataatttatttataatccctccctatgtgatattcagagatgaaatttgaggtgaaaaaattcaagtattctttttcatatattttgaaaatataagagtctttgatgtattctgggagctagcatcttgaaaagaggaataaaaaatgacttatctggagttaggaaggtgctagtccatcacccataaaccagttaaagagataaaggtgatttatcagaaagtacaacaaaagtgataacaatagaatattattctccataccaagcaagttacaggtatcccctgctctggacaaatgcgtgatgtgtaaacccagattgaccaagggcataagggagatgtagatctgtagctttagcacacatgaccaaggtggtgcacttggtgtaggctctcggctgattgctgactttgcacacttgcggggcatttcatgaatctaaattcgggaataagatttagaagctggcagatgacgaagagattgtttgggcaaccaggactcttgtatgtgacataatcaatgctgaagttagttcatcatcccattccttgtatttccaaatctgtgatgcttagggccttatctagtgccttttaccaagtgggtgggttgtagaaaaaaaaggactaatactcattttctttgaaatataagcttttgaaagaatattttaaaaagaggactaacattttagctttcatgtaaaagtttgaaaaaatgcaatttcagtacttggaaatgagcattttaagactccttgttgacttcccttgtattttaatgcatttctagagagatgtctgcttctgcattgcttccccatgatttacttcagttgaaagttcagccagatccattattttctttctttgacacattatgcaaattaaatgcaaaattcagtgatgagaggaagaggtctcagagcattgagcagatgccgtgtcggtaatagagtaaggcaattacaaaattacttgcagccactgtgactgtgtattttcccgtattctgaaaagaaatctgtcatgtgctcatcactacgagatttatttttccattgatgtgtgggagatttatgcatttaactgtcgtacacattgatgagagaaacatgcacctacagaaataattttttatagattagtgagatatttaattctgactttcttttccactaaaatgatcctttgtaatagtcttctcttcgcctgtattgtaagtatgaacatcagaatggctcagtaagctggaagagcaaaaccatgtctgtgtgtagaattccaatgccaaaagagaaataccacttatcttccacttctataaataaaggcaatagcaaagtcattaacaagagcaaggggtgaattcaatgatctctaagatttttttccagctaaaaatgatatgattcttatctattactaggaaatagtggtattgaagtagaattatgagctctacattcagtctacttttcacatcggattgtcatctcatttttggagggtaattctctttagattctctagtcctaagctgtaatatgtcttatagttgtcatattttagtgaacaaaccagaaaaaaagattgcctgcatcatatgtaatttttgttcaatccaagggcaatatcgtagaatacttgactcatagtttaaaatgatcatttttattgagttcaaattaagtcttctgtagatataataattatgtgaatcaaaaatatgtatttgtgtgaagaaatgctctttcttttcaggcttgccttcaaaaaaagttagtctcatactgaatggcaataatttcttcttcctgcctcctaagaatacattgaggatataaaattatgagactagaatgctcttatttcaaaaacattcacagtaggcattggcctgagcaataattgtgaatgtttcatatttagagaatgggtagattattaaatatgaactatgaaaatttctacccttctggtttttctgtgggatataatcctctggtcttaaaaattaattttagtaatggattttcacaagttcccttggagagcatgcttggaacatttttgtgacatacactcttgaggttttccttctaaatttcttttcatcactcattttgactttcagatttcttaaatatttgttattacgtgtatctttgtaaataaaagtgaggcttaagaagtttgactttgttttaggatggaaccttgttaaaagtacaagcacacatgtgttgacagcagctagaggaagcgtgatagtgtggaaagaaacagaagtccaaagacctaggggtacatcaagttccattatttaattgtcatctttgtctttgctactgaaagtatggtccacagaccatttgcatcagcattgccagggagctggttagaagggagaatctcaggccccttctagacttactggatcagagcccgcattttggcaacattaccaggaactcatatacacactcaaatttgccaggctctgaactctataatctccagcattctgatttctccaagtccctcctttctcatctttgaaacagagtaatttctacctcacaagtctagtcgagaattaaatacaaacatgtaaagctgctgtgttcggtgcctggcatacatggctgtcccccattcctgccaacacacaccttcaagcaagacaacttgagagaggctgagtgggagagagggtgaataaatgttaataactcacattagagttggcattttttttctttttacttgtctctattatatagggtgactgtattaattgtgcaatacctttgcttttaaataatactactgggataaaagtgagattctaatctcacatattatttcaagataagattcagatacagagttttaaagaaccacctataaaaatcaaatccacataaattcagaggaaaatatcctcaatgcttatataatattggatgtttagggtgataccctctaagcacaacttcaaaggaagaaatcattagggaaaatactgacatatttgagtacatatatgttttaaaatttaatttacttgaaaaggaatgaagataattaaaaaggaagtcacaaattgaaaaaaattatatgcatagacaaagagttgataaatttaacatagaaacaggttttacaagacaataaaaggataaatgtaatgattttcaatagatataagacattaataggtgggcatgtaaaaaatgtcaagataacatgaaaaaattagttttactactcataaaagacatgcaagtgaaaacaaccaagatgccatctccagtctatcagatttctctaaaaatgagaaagcgctcataaccagtgaaggagaaaaggatctgctttcatcttggttaagatatacattgcaacaatatttatgggaaattctttggctatatctatcactatgaatttatgcatacatttttcacccaataattatacttttgagaagttatcctaaggaattaatctaaaactgaaatgatacatgttcaaaattttcattaaagaaaaccaccaaactgtaccataatgggaactattcataaatatgtaaattatgtccatatgatagaatactaggcacccattaaatcatgttgtaaacaatatttttattgaattttttaattgaaaccaaaaaagagcaagataaactcagtatacatagcatgtcatttttgcaaatgtgtatgcaaatgtgtaacatgtatatttttaagattggaagctggtacactaaaagtgaatgttaattctgggttatgtttttcccaaatttttgcctgtttctgccctgcctctttgattttaacattgagcatacatttatagtttaaagactgttaaaagtggcacttagatatagcttaaaaataattttaatagcacagggaaattattttattaatgctagttaaattagacgaaaatataaaattttaatggcagaaatatttcaatttataacatatgcataggaaactgaaaagagtagttagctctaaatatggggattatggataaattttatattcttcacttttttatttcaaaatttttataattagctttaggatttttataaccagaacaaattacatttaagactcccttctaaacttatttgcttattttcaatctcaaattgtgaatttgtatggcctctatatttccaatctaattttacagacattaaatttctcttgaaattcagtgaaaaattagcagagtcgaagttacacttctgtatggcatttaaattcctcctcccagaatacagccactgttctacagtacagaggagtccttcatatcacgattttcattgtgtctaagaggcatgtgtttccactttgtcattatttggtctaaaaggatttttcttctattttgctgctgtttttgtacaagacatataaagaaaggtgttaagggagtgttaaatataatcaaggtgttaaggagaagagcccagagagagaactcttaatcttttcatctggtccagttgtcaaagtcttttgtctttagccatcacttttttaatcagagacatataatctattaactatgggaacaagaaccacagatttagcctgtgcttatctggaaacctcccctaaaatactactgaacgactctttttttttttattcctgtctctttttctgttgcaaactgattgtccactataacctggagaggggactcaatttttagaaactgtcttatacacctcttaattagttacctattgctgcatatacccaaaatttagcagcttaaaacaataatgaaattttattatgcccacagtttctttaggtctgtagtaatttaagagaaacttagctgggtgattatagctgactctctcatgatattacagtcatatacatcaggactgcattcttctgaatacttgactagagctggaagattcacttccaagatggctccctcacatggctggcacattagtgcctgctgttggggggagacttcaattctttgttgggtggtcttctccatggggcagcttaaggatcttcatggtttgtgggctgtttcacaaagtgtgcgtgatccataggagattaaggtggaagctgcaatgtcttttatgatagagcctcaaaagtcacacaatgtcattcccaacgtatcctttttttcacataggtcagccctacgcaatgtgagagtgaggaagggactacagaaaagaatgaattcccagagatgagtaggatcatattgggtgccatcttggaggctggctaccagtgaagaagactgctttctggccctcagtgatttacttccatctcacatgcaaaacatactccctttattgtggttcccaagagtctcattctattatggcatcagctcgaagtccaagatcttatcatctaagccaggtgtactagttttctttgctgtctaacaaataatttaaaaaatgtagcagcttaagataacacccatttacatgtcacacctctgtaggtcagaagtgtgggcaaagggtagctgggttcttagctcgaggttgaaaccaaggtgttagccatggctgcggtccttatgtggagctgagggttctctttcaagctcatccaggttgttggcagaattcagtcacttgtgactgacagactggtgttcctagagaccacctgccattctgtactgcgtaaccctcttcacaatatggcagtttactccttcaaggccaacagaagaatcttcctactgcttgggttctctgacttcatttgaccctgacctctaaacccagatttaaaggttttatatgattatatctggcccaccagcaaaatagtcctttttattaactcaaagccagctgtttagtaaccttaattatatctgaaaaaaacagaatcaaaggagtggtatctcgtagtattcacagattctatccacacttcagaagtggaaattacacaaggcctgaacatgaggagatgggaatcttagaatctgtctaacataccaggtctatgtgcaaataagatcaatctctgttagtttactcttatggggtaattaattaccccaaaacttagtggcttaaaacaatagcataactaacttctcagtttctatgggtcaagaattcagaagcatctttcttcagtggttatggctttggcactcatatgaagttgcagttaagaagtcagtcagggtgatagaaatataaaggcttgactggggctggaggatgtgcttctaaggtgatttactcacatgatcaagttggtattggctgttgcaggcaggtctcatttcttccgcaaatgaaatgctctccaggctgcatgagtgtcttcataacatggttgctgatttacattggatggagagatcaaagaggatgagaggaaagcagcaatgtgttataggacccaacttcaaaagttacacatcattgcttctgccctattctgttgggcaatcctgatgcaatataggaggcaccatgaatagcaggaggcaaatatcatctgggctttcttgttaacctcagttaacaacaacaaaacaaatatttaaaaaactaaaggaaagagatttctggaatatttccattctctgtcatgcccactgccatagtctactcaagttctcatctcctattggacctctgcggtagctttataagtcctgtccttgtttccaatgtcatccctttcaaaacgcttcaaatagcctccttaaagccatgactcctcccacggttataaccctgcaggtaaaggcacttgaggacataatctgtaccatctctggcgtcatccctttcattccccttcacctcccccaactatttttgtatttcagtcatgctggacctcttaatgtttccccaaaacatcctaagcaatttcacgtctctatgccttttcttttcctgttctctttgcctgaaataagaacgacagataatagtgactatgcaagtcctaaaatcgaggcagccacagtgctaaatcacacattggatagttcaattttattcttataacaaccctttgtggtaaatcttattaccatgctcattttacaaatgggcactcctaacccgatgtgcataatgattaaaaacatagactcaagaaaagtttggaggttctggcgtaaccctctttgttattctctatgcaactagcttaaaaataacaactttgattattctaatctattaaccagttttcagtgtgtctgaccaaatcagttgaattttatttttttaaatatgtgtgtgtgtgcatgtgtcagtatgtacgtgttaaagagtagagggaggaagttgaaaatctgacatttgatttatttctcctgggacaaaggaagtttggatatgtcaaactgctggctaatcaacacgttaatcaatgcaaatctctagtatggatatagttatattttgcccccctcttcctttccaaacttctttccagtctcatgaccagcttattggcttcatattaccaagtaaatatatcaactgcccatatgtatagtacccagacaatgagaacactgcctaaatattgtgttttcaatactacttgcttttagcaacaaatcatagcacccagcctaactttaaaaattccatgtcatccaacttcaaactataacaaaaattgagttttacagaagagtttcaaaacatttttatgcattagacacttcagaaattatctcttaaaaacaaaacaaaataaataagggacaaaaacaatagaaaacgtcaggcaccaaactgtgaactctcttttgtccatgtatgatttaaaaaaaaaaaactcactgatggtaatttaagaaatttgacctttaggaaaatcaggctgaggctcatctttgtactttttaaaacaagtcaataaaacatataaataatagagatgagtgccgctcacaggggacactcatattttctaggagcctgtggatataaacaatgaatttcatgaacacagagcacatttctacatgatctccttttctttacaagttatttatgttttactggaaatattaaaacttcatgtctctttgttgctcttgtttctttaaatttttatttttatcatcagtcattgttcaataactcaaaatcatataaaataaaacagtttcaacatcattccgtactcaagatgatctctattaaataatgatttttttcttgaaaaagcattctataattttttttagttttccagatgactatttaaaccaaatgtttaaatgaatgattaatgagtcttttatcttatttatcccacctgcctactgcaaaaagacatgaatttaatacattttagattttaaacagttgtatatctgtaaaaaaacaatttttacaggtttcatattctggacactagaaaacacttcctcctcacagcgccgagttgtatgaaaaggcagctcaattgtctttccttgagcagccttgtgtgcctgggtattcccttccatctctcacccatggagttcatattcctgttgtcatgtcaccacctctgtcaacgaaataggttctgccatttctcaaattttatggagaattatcctgatgagttaaggcagaggttgaaaacttgcagcccttaccccggttacggattttatttttaaaacccagtgtttttgaacactttacagctgatatttctattctaatggatgcattatcttcttttaaaaatacttcctatattagccctcttaaggggtatgaagtggtgtctcattgtagttttgatgtgctttactcactcttaataccgttattataggttatttattgttaaaactgtgatatattttcctttattttctacatatacatagataacatgcagtttgataatctgcatttaatcgcattagaaaggtattttgctatgtcattaaaatttttttgtgaacatcatttttagtggctgcaaaaacttacataaagacagacatgtcctaatatatgtgtgtgtatattttaactaaatattggcacaccaaaaataatggatttaatgcaactagcaatgataatgctcaaacaacaggagtgctatgaagacaatgaaacaggtgagttgtcagaacaccttctgtcattacattaacttttttaagcactaaattcacttgaaattacaataaacaagataagtacaagcattagataatttgacctatcagatatcccaaaggcataaactatcactagagggtcttttctttatgcaattaggtgaccagtgactcttattttttaaagcttttaaaataaaaaaatagctttagggataaaaccagccagatttttatcgtcaaaaacatgttcacagttcagctaagccttgctttcttttgaagaattgctctttataatgctcaccaatggatttagaaatatcccattgtaatcatgaagatctcaattatatgttatgaaataagaaacataatgaaatacttgaaccttcctgccccgcatagcagatatatttttgtatttatgatattcacagtaaaaaagctgtgctgagaagctcaaaatagtatttgatcttagtggttttggagcagaggaattggcattgccatgatttttctataacttggcgcaggccaatggtttcaggcaggactttcagagcagacttctgtcaaatttgccatatggagttactgggctcagattatagaggttttcctggttgtttgcctaatttgggaattatcagtgctctccaggattttctccaaaaacaaagaacatgttcagaagaaactgacacttcaggaagaaaagtagtttgatatttgagaggtttagatggtttctaatatttctaaaaggtaccatgactcgtgaagaatttgactggtaaaaaagaaaggttcctgttatccctggaacacagctaacagtctggcatgtagccttacctgaactggtaccctccccgtacacctcacacttagcattctgcacagccaaagaccctgtcagttattggccagcctgaagaatgaggttgaattcaactcagggactgaaatctactttatagcattttaaaatattgtagatccaaccttgagttgacctactccgcaggttcatgggtgattaggtgtgagatacaatgggaatgaatatctgaaaaccctttgcagaagagaaggaggaggaggaagaataaatccaatttttacaggtttcatattctggacactagaaaacacttcctcctcacagcgccgagttgtatgaaaaggcagctcaattgtctttccttgagcagccttgtgtgcctgggtattcccttccatctctcacccatggagttcatattcctgttctcatgtcaccacctctgtcaacgaaataggctctgccatttctcaaattttatggagaattatcctgatgagttaaggcagaggttgaaaactcgcagcccttgctccaattacagattttatttttaaaacccagtgttttttaaaaaatcgagggagtttacacaaaaattcatgttttctgtttctctagaaaacagcaaatctggcaacaccctgctcacattcccacctaccaagaatgctgcacattaaatggtggcttttctttaggtgactctaattcactggggtctccatgtgacgtttcagcctttgcaccctacttgtccgctgcaggcccaggagctctctactcctcatatgcattacaggaccccatgcacattgaagatgttttctcaggcagagcagacaccaggcaaatatcttctggtcttaggagcaagtcttctgagaatcaatgatgacaaatatcttaaatggtctactcgatggttctgaaaatgtaagagctaaactacctgtatcaaaatcatcttgggggcttatttaaaacatatatgataaggccccacctcaaacctaaggagtcagaatttctacggaaaggcttgggaataggaacattaacacaagcatcccgggtggtttttatgaaacaaagcttgagaattattgaattcttctccgatctgacagctcttctcctgggcagacccaattagagggaactgatgagttttaggaaatactgtaattctaactcatcagtccagcagtgctgaaaatgcagaattttgtccttatcaaaagccaattaatgctaaccttttcagtgtgtgtccagtaccaccatcggtaaggtaaataaacaggcagttttgcatataatctagtgatttttaatttagttttttcccttactcatcctaaaaaaagcagggagtcattgggcttttgtatctattttagctgagttattattttaacccctatctttagtgcagaattaaaatatcacccttctatttgcttttattcctaatatctgaatggtttcagcttgacgcaattagcatgtagagcatgctcacctactgtaatctcccagatgagtcactcagctccagcacataactgcttctgggatcctgttggctaaccaggctttgaaacccagggaaaagaactgtgtgttttcttcagaagtaatccataaatgagaaattaccataaataggcagttttattcactctaagtgatttttacataaaaactgacaaggccgtaaattgtatatagaatcaggttccatatccacacagctaatgcacacatgaattattcgatgaaatttgcttcagtagtattatctgaaattggtttcagacaatacattaaatgttacacattatggtaaatttactgtatttttgttccagccacgtcttgtgttggcaaatctgctaaatttaagtttgcattgtattcacatgtgttgctatttcctgagatgtcccaatatattttagccatcaaacaaatagaacttcacctctctgaggctcagtatccacacttgtttatcatgcaagagacatgcaggtgagaaaataggcaactgccattctatctgtgattgctgttcatggaagaagtaaaaatgagctgggacaatatataggtggcgccagggatggctccttgaaggaagtgatctcacagctcagacctgaaagctgagtggaagttaccagaggaaaagagaaagggaatgcattggttttctattgctgggtcagaaactaccactaactcagtggcttaaagcaccattcattatctcatgttttccctgggtcaggagtcaggtgcgtatcagagtctcaagaggctgacatcaggtgtttgcagatggcattcatgtctggggctcagggtcctctttcaagctccttcaagttgttggcagaatttagttgctgtggttttaggaccgaggttcccactttcttgctgatcaccagcctggggcagctctcagccccttgaggccacctgcagttcctcatcctttggcagatcctctcacaacgtggccacttacttcaagaccagcaagagaatgttcctcttcaggaagggcccaactcctccttatggatgttcttctgattcagtcaggcccacccaaaataattgccatttttggttaactcaaaaatcaactgatttgagatccttaattacatcagcaaaatccctccaccttctccatacataataacctaatcatgggagtgactgttcatcctgttcgtgattaggctcacatataagagaaggagatcatataggacatgcatgtagaggatagaatcttgggggccatcttaaaattgtgcctaccacaaggaaggattttccaggcaggaagaaccagatatatgaaggaggcctaaatgacaggatagcaatttccagtgtctgaggctaaggctggaatgctgacctggccagatcatgcactgctaggtttaatggcctatgcatactctattatgcaattattaaaatacctgtttacaaagaatatttgaaatattaaaaaatggaaaactgcataccgtaaaatattaaatgggaaaatcaggatatgtgtttatataacatagtatcagttttggaaatatatatgcatatcttaaaagactagaagtaaatacatccatctgttagccatggatatctctgggtgagaaagtatggatgagttagagattctttgtcccttttcttagttctaaaatttgccacaataaatatgtattctcttataataataattaattaaaaacctattcatggtacttgcaaaaacaaatgaatttgagcagtctctttgaaggaatcaaattttgtactccaggtgtttgagaggttgaaaaacaagctcaggaattagctgcgcatgatctgtacaaacaaggggatcagtcagtggaaatgaagtccagcttcagccaagggtggtgagtataacagacctactctgatatgtttcatcactaaacattgagcaagaaatctagtgtttaaattatggaggcattaaagcaattaacctccctctacctcaattttcttatatctaaaaattgaggggagcaaaattccattcttgtcacaggtctcaattgcaagtagcatgcaagcaagtaggctgaactcttgtctgtcaatctagctccttcctggatggggtatttaatcagctctccttcccaagcacccagtggacttgaagctcacagttagacagagatggctagaggtgccaagtgctgtttatcataggtgacatcacctgtgtgctcagagttataaacataggcagcttgcctactgccaaatccattacaactttcagaggtgttcacttaggaagaggaggaaagagttttttgagaaccagatgggaacttagaaataagtaacattgacaaccaaatccttcagacacatcttcaagtttcaagagagcagttaacaaaaaagaaaaatgtatttttagaaattgtttgggaggtgaaaggatttttctgggggggagtagggtagggaatggatagagatgatttttttttggctctgcaatatctcagagatctttgagttgaaatataacaaaatgtatttcctctctcttgctccaaaaactgaaaagcaagtgcactagaaaatgtcagagttggccactgaacagaccatatttctaattcatggcaagatggctaaaataaaaattcttgaaatacgtattttaaaattagattttgacctttgatagggcttatcatgctatttatattgtagcagaaggaactgattttttagtagttgcctcatcaaagacatgactcacatttccttaagcatttacaccatatgtttcctgaggtaaaaaaataaataaataaattttatattttttatacaattagtgaaatgtgagcaaaaaatataagaaatcatttaaaaaatattttggggaggatgtggtctagaaatgttgttttctagaaattgaaattatgttagctatttggccagtgtagccattaggtacatttatgaatatagatgagaagtaatcattgtgatgctagttttatcattaaggaaaaaagcagaattcaaaagtttagcaatgaaacactggtactactgaaactcactttatatttgaaaatgtgaatgtgagtttaaaaaagcttttgttagactaactgaaaagaatcattttaacatttaaaaagaaaaatattattttaagtgacatttggtgacattattatatgtgtacaagctgtgactataagataatgagacaaattattatgtggccagtggaaattaaatttatctttatgattactagcaacagggactattttattcaactatctttacataatacaaaattattgtaaaatttctaggaaattcatattccacttaaaatatgaggaagtacatttggaaaaaatattaacatatgaaaatcagcatcccagttaaggaatccccagtttcccacttggtgctcaaatcacttcacgttttatttcattggtactttttctagggcagtagatttaggaatagaaaacagactctacacatggaatacactaaagtcttgaggaggtgtgatatttccctaagtttggataggtggtatcatcctttcagtcactcttgactctgcattagactctctacctaatgatccccaagtcatttcacttctgccttcttaacattttgaagatgtcctctaaaatttcaagtcccaccatctctgcctccgaactcacctccctgactttcagtcttgaagcaccttaacaacccctcccctcctgtgcatgttccacctggaaaccagggtgatcactctgaaatgccaatctgatcagtcatttccctacttttgaaccttcaataacttcctagcacctattcctagaaaccattccaacatatcacctaggcaaaggaaacccttttcttacctggctcctacttatccctccagattcaccttttgacacctcccacttcatctctctgcagcccccttcctgcacacacacggagtttcagtcttgccaaactcttcgcagcttcttgagtggaccttgctctctgcactacaatctctttctgcctagagagtcctttacctcccccaatctggttaacttctactgtttatttaagtcttaactctaagtagatgtcatttttgaggatgctctctctgttcccactttggaacttgggcttctctgttgtcctgggtgtcccgtgtattcctctgtcatagccctcatctcattgaattgtaatcatgtcttcactagtgtttcctttctagcatgatagatttttgtattgccagtgaccccaacaaattccccaggtcctagccctgtgactggaacacagtaggcatttaataatagttgacaaatgagttagtatatgtaatgaaaaatctacctgcctgagcattaggaaatataaaattaatctaaactttgccactttctgtaatatctgtgtgtcagtcaggaatgcttttggctgcaagaaaaccccactgacagtcttttaaaacaaataaggaagtctaaaaggagtcagatgctggccttggttcaatacaatgttagaggcagcatctcagtgcttctctaatggtcacaaaatgactacagtaactccttccctcacatccacttccagttcaagaagcagaatgagagacagcaatagccaccctgtttcttcatcaagaaagcaaagatatcttagaagtccccactgtccttcatttacttctcatgggctagaattatctcagtggccaccccaagtgcaagagaaactagggaaattagtttttagcattcccacactctatgttgaaaatgagtaagagacaataatttggggaataggtgtgggattagtcagccaacagtgtttgctacaccttgsgacaaaacattttacctctcttactctttgattctttcattgagtgaagaattagaataagtaatctttcttcaagaatcaattttctctcatctataactcccatatattcttatttccaaaatggaattaccttctacaccagacagttacttcaagcttttcccctgaatatttcacatttccagaaagcactatattacaaagaagcccttccttttcaagaactctatttgccataatgttctccctaacaagggctgaacagtacgtgcccagattccctgcctctgacctcaccacaccctcttctgtgtggcggtctctcaaattgtttaggacaattatcatgacttctctaaatctccctttttccaggctcaaattccctatgcttcagtagtttttcagataagccccttctgtcccttcacaaccctggtcagccaacaccagacatactctcttcatttacttatgattcattgaacagataatcactgagttcctgccatgtgtcagcactgctctaggagctggtgatatggtgagaaacaaggaagggaaggcccctcctctcatgaggcttacagaggagcaaaggaatcagatgataagataagcgttacacacacacacacacacagaggatcatttcagagagtgattcgtgccaagatgaaaatgacaaagggagataggagagtgacaagggatgtgtgtgtgtgtgtgtgtgtgtgtgtgtgtgtggcagtgcacgtgtgaaactagaagacaagccttcagatgatcagggaggtttctctaagacctgaatggggataattaactagcatggaagaggaagaggttttgaagcaggaggactttgtaagtgaaaggccctgggtagaatgagctagacctgagccaggaaaaaaaagatgctcagagggggaaagtgttggaagatggcctgataatgcacatggggagccccccaccacaagctcatgtaggacaggacaagaactcagattgtattctaaatgacagtatttcaatacccatcttaaaatgtgtctggacaaaacttaacacttagctacacatatagcctgactggagcagtccagtttataacctctccttgtagtgggcactgtatttctatggatgcaagctacagttatatgacttttgtggaagccatgctatccccacagttccactgtgatttcctatatgctctttgatgcacactgctcacatgcatgaatattacttgcacaaagagagagagtaggtggatgtgatgccaggagctattagaatgattcacattacacttccaccatatgaaaaataatgtacagtctaaagcaacactgcatcatatcatcgagcagcttgggaaagcctaaattacatatttgaagttcagtcagtcattgaaattagataatctggatggtcctgaaagtgtctttcttgagagctttcctccaaaagcaaaattgaatggtaaggaaaaaaatgaagtacaacaaaaatgacagcaaaaaacctgaaaaacaaaaaacaaaaaacaaacaaacaaaaaaccccaaaaactgagtaatatcaaccaggcaggagttgaaggagagaagcccaactgttggtagataacttgggatgagccaattaaatattggtcttctctctctcagaggccctaattgcattccctccagcagccacaggcctggggttttccccaggcctgtggcattcagacatcagagctgagaactccagtgaccaccaggctgcattttaatgctaagctgggagcattgatactctccaagacagccttgcaagctccatcttccactgactcaacgttcagtggaacgttcagtgtgtttcatctgctgttcagtcatgcaggcagcagggatcctgagggctctcctccccaatatggtaccaagttttgattcatccttttcctcttccctatcagcaggtattctagaagacagttttatgatgacattcacagctagcattaaaaccagataaaaataaaacaggatgtcaataaagaactaatgatgtgtgtctgtgtaaatgtataataataataaaaagaatagacatctgtttgtcaaggtaccatttaaggccttggggctttaaatgaaactgctttataaatgcaccaacatatgtgactgtttgcctacgtctttcatccatgaaaattgccctgtagacagttgcctttgaggtgaaaagcattctataggcactaaatattatgctagaacacctctaagtgctaatctaactaccttcatgacggaagtttcaggagaacaatttaagggtcatggaaaaaaagtgttaaacgagttggtaatctgacatttcctaaaaactagattcaaaaccgaagggaaagtagagagaggaatcaaaactagcctagtaggatggaagtaggcctccctccttggaggtgtgaaaatgcctggaataatttaggcaagaatgccaactgtcagtgatgaccttggtttaggggcagttatagcatggtggaaacacccctggactggagatccggcatcccttatggggatatgaaagaaatttggcaggtctcttaacctctttgacattcctttcttctttgttaggtaagaagctggtgctggttcagtgtaatttgaactgtgttctgcatgactgtagggttctgcttagtgccacgtggaggtggggatgccttgggtgaagatgaaggaggtgtagtaagcaggtggggctctgcactctttttactctccttcttccagtatcatcagaacaactccacttttttgtctttatacactgagttatttataaaatcctagtttttttaagtgtcaaacaatgcttgattatgaaatgatagcattattctagcattctaactaaagtgtgtaaattataaacaactatctttaatggtcaacaaattgtcatcattactgagcagtgttgttagtaacaccaagtaatacaattaatgaaatccttgaaagtagaacctatcagtgagccatgcatacaactgataagctgtggataatgtatagaagaatgagttcatttggtaattatttgtacttttcaaaatattggtgaactttcatctttaaggagcaatggtgtcctagttattcttgccacaactgcatggaaactctcgaatctgttagtatgtccttgggcacaaaaacagtattttttggaactgctcaaaaattatgtagttttgtagacatttagggaaaaatctcataatttatgttaaacactcagttgtcttggtgttgattgaaagcaaataatacgtgcttaacatcctgctagttgctgagggagattcattcatcattttagaaaatgtttctgggcatcagtcatataataaacactttcccagcacttggcttcacaaaggaacaaaacagacaatgcacattcctgccctagtggagcatatattctagatgacagactgaacacctagacatatatgacaagctctttcttgcaaggagagtccagttaggaaaatgtcaacacctaaaacagttaaaggctaagatagcttctgtggacactaagtgctacatagtagttccagaggaggcagagagttagacctggctagacactggacagggggtagaattagacagatagttcctggcttggtgcctggtacatagtagttgctcaataaatatgtgttgaataaatgaaaaaccaggactgactgaatagacagtttacacatttacataataagtgtgtaatttagggaagtggggttagaatgagcctgggtgaaggaagccttgaatgagagatggagaactgtaaacgataaaggttttgaagttggggaaaggtgagggggaagtgaagtgtaacatggagaagcaaaagtgtgaatattttccaagatgcctcgacgttatgatagatgaacctctgagacagaatgtagggggaagatagaggaaagagccaaagagcctctgagggtgcaaagaagtaaagaaaaaccaggatgtatgatgagaattttattatggagctatccagtgtggatgtgacttctcttccccatatcgacacaaaacacttagcaaaacatttctctttctctctctcatgctctcctgttctttctccctctatctctatctccttttgctctatctctagatatctattagacagatgatagatagacagatacatagatagataggtagatagatagataggtagatagatgatagatagatagatagatagatagatagatagatagatacatcttggaagtggtaagacagaaaaagtagtgagtatagcctcaaaatggctgcagggcaaggtaagaagctgagctcagccttcaatccaatccctgtttacactctgcctatttatttgtttataatatactctgactccccatcgacatatttacattcttggtagaagagattatttttgatatctctttgtatttatttcttagcaccaagataattttaaccactattttattattgtaaattctattgtttttactccaaagaaatacatatttgttgaagaaaaattagagatacagataagttaggaaaataataatatcagaaaacagggccatcatttaaaacatggttacataaataataaagtactgtgctaagtattgtaatgatgctgatgcttttgtaataatgatactgatggtgaagatggtgatggtgatgatgatgacaatgatgaacacatacctcccactgattatgtgtaaggcactgttctaaacctttgtctaaattaatgcatgaagtcttcacaacagcctcaatagatgttattcttcctccctcctatttattttattttagcatattttatagatgaggtatctgaaacagagataagcaacctggcctgagtcatacaacacaaagtgatggaggtaggaaatgacccagacggtcaggctccagttttttgggcactaccaaattatattaataatacaactctgtagcagcctgctttcgagttatggaatagtttctagaataagtcacacacatagatttcgagcccaggaccatctactctgagcagaagctcctacctaaccttgactataaactgactctaccagataatcacacttggcctttctgtaagtgataagcaacttgcctctgtgggcacctaccctgagaaaggtagtcaccctgctccatgctctgtttcaagtacatttattattatttatgaattacttattaacataaatttattattatttacgtattatccaacttattaagtgatgtatatgtatgcaggtgtgtatgattatgaaatacaagatgaaagaactgtaagaaaatagctttgaaaaaattagtaatgactgggccatagcccagtgataaggcatgttcacatataccatttcctttcatgatggtaacagcccagcaaggtaactgtcatcagggctgtcatgtattctagtactgtttgtgtactgaataaaggcatttgcctgagggatgatagggctcaaatccaggctgcactcctcttgatgatctatgaacccaagaagatgagtctacctggagggaaaggcttttccaatatgcacaaagttccacagaagctagagttgtcttgggaatgattatctccattttgtaaataaggaaattaaagatcagaaagattgagtaatttctcaagaatatgtatccagcaaataacaaatcaaggactcaaacctaggccaatatggctctcacttcctttctccaaaatcactgctatgtctttcaactaaattgcattgctctgttcactggtacaaagcttgttgcaccatttaaaattcaaggactatctgattgtgtattatatttttagatcctttcctgaaagcaggttttaatggggagggagaaagtagcaactggaagagagttttgagatggtagatggtaaaatgtgcaagcaaattcccaaaaaatctggggacacagacttcactgccttcagaataattgaaaggagaacccttcaagtatgaagcttcagctgaaatttcaacgtggtttatttacctaatatgctgttcattaattacaagctattagtgactattagcctatgaaattgtatttacagttcagaaatgtatttgattttcacaagccttactggggaacaatgctcagtcaacactttcttcgcctaaagagtacgatcaaagagcatgaagcgtagtaaatgtttagcctttgaatttggagtttacaaaggataattatccacgggttggtgaattcatgttcctctctactccacacagcctctggtttgcatttacagttttgcacaatcagatgtaaaattaaaatataatcattccattttaaatggttccctgtacaattatctcattttaaatcttttgctaatgtggttattctaatgcaactatgatcattattttatgtatgtaaagatgtcaatactgtccagctgatgatattatctaatagtatgtagcaaagcatgttcccttcctacagtgcctcactctttcgatgggtaagatgggaggtgggagtggggggagcatggcattagctgtggataataaagcaaagtaagtacaataggtgttcaataaagtcatcatttttggtacttacgatgtagttttcttgttcctttggttccttttgcagtgggtgtatttgcttagacagagagaagtggcagagggagactgcatttgtatttggttatttcagagaaatgcaacttggtattatgagcctttaattctgtagggcagtctccagatcattttgatgctgaactttgtcataaaaaactattgatttttttcttccaattataaacatttgctggtttcttgtcagttaataactgacataacattatttcagacctttcacttagggctctgttgtgtgtttctcttgatcaaaattattgccttagcatatcaactgaatacacaagagaaaaatcaagttatctatgtttatcatatgcatttttgaatacctatatgtgatgcttgagcatagtggttttwataatcctgtaagcgatttttcaggagaccagatctgacctcctctctcacacccctttcacactgcctgcaacacaccacacataccacacacatcaccaccctgaccgaccaatggaatctgagccaactataaatctcaaacttgttgatattggataatgcctggaggagaaacacggctaccgttcagtaattccagaaagaatttcttctttaaactcagtaaacccaatggcttctcagaaagttctttctgagttttcttatttgaaatttgaaaattatttgaaattgacttaactgacatcacctgttcccctctggatctcccagtgatttactgttgactctttcaaatccactcatctcagggctgggggactgagtcacagtctgctttttcctccattgtcatttccaaatttttcttccctctccttgctgggggctggtgctaagttgaccccatttttccctccttgtgctgtcactcactgcctttccagaatcttctgcatcaggtcagtcactctttccaacttaattccatatgtcaacccattcatcaccggagccacgtggtttccttcacacaaattgtcttctctgcaccacagatgccagtacactctggcccttgccatctgtccttaagatgcaacaccggtctgcttccaaaatccctagttcagacagcctgccttccagttgccacatcctgtttgtttcccagtttaactatgtcactgccactgctgcttctacttgtcagaccttcactgacctctccatttcccccatccctccatttcatccttacgttccttccggcccccatctctgcttcaaygaatgaacccgttttcatctgtttttccatgttgggattctagtcagatttccttgaaattaaagctttttctagtataaacactcagcctgtctctctcactttaaaagtgaagacatagacacacagagaagtgagatgatctttgtccaatattgattagtggtggaagtcccttgatagccaatccatatttctttcacagtaatagaaagtaccaaactttaaaaatgagattagaagttgcctttacataaatgtttaggcttttgakatctcagggctattttgtaatactctaattttaggaatcattgttacaatgtttcaaatctactgacttacacatatatatcctacatatattgtctaaacatattctgtagaagcaatggggattcatgattatgaaaaaagtggccattgctggtttaggcagtgtgtaaatgttgctactgacatcctaatgtgattttaattcttgcagtctggtgtcataaaatagctttcaaaaaagagcattttgatcacgactcattttccaatttctctcctccatgatcccaacatcttcctaagaaatccactctgtacctgagtttccacatggaacttaggacaatgatgttagtgaattagaggtctggcagaatcaaacgaaagtaatcctcaccaagtcactaaaccacactactttgagtctatgcaagttcaggaatttctatttgagcaaaagccacaaatggccagagcggacctcaggctttgtgcttgaactgcctaatgccatttgatttttcgatcccgcacttttccttgccagaccaatggtcttttctagcagtaaaatttcagaataggtaggctaccatcactctttgggttaccccagtgtttacttaagttgaaattcaaatagatatgtatttctatatgaatggctgccattctgctatgcccatgtttctgtttctcactcatctctggcttgtctcgtagagccctttctggtgctgacttatgttgctgagtcaaaggctttcatagtcaaagctcttctttttatctgatatgttttgcagtttgctgtactgcgtcaactctactgggatcatatttctcttgagactaactactaggcaacctgtgccttcttcctgcactgcattttgcaagtgcttcttaggatttcactttcatttaaaggcagtagatagctcagagaatgtggaacagtaactagaacagatccaagagctgtagaatcaaagaagagttaactactgtctctgaaacttagaatgtaaccaaagtcaagctatgcaacctcactaagcctgttttcccatatttaaaagtggattgtaatgtttatgagtctaccactacatyagattggtgcagtgattacaggagacagcgcatgtaaaactcctggcatggagcctgatgcatttgaaacatttactacaaactaccattgttgttatcattattaaaaataacccattctttcaaagaatcttgttcttggccaccaagcttggaagtcagtgatattgttcatcttatttgcccggttttttttttttttttttttttttgagaataatttatgacctctgtggcagcaagtctggcctcatcttgaccattctatctgcatgtactaacttttcaattttaatggccctgtgagctttcctcccataagccaaaaagtgctgtttttctattctagtgttttcttgtcaggcaacaataatttctaaataacatgcctcttctaaaccaatctcttaaaaaatagattgtttttgtttctgaccctttctcattccatttcagaaactattttttctccttctttaagcaggttacaaacccttatatttttaatatgctgaggcttgtagtcaaaccattactgtcccaaaagaaaagcccttttagcacatttacagcttcttgctatctgtgccctaactaaattgtgctacagggatagtttcttaaccattaaaatgataggtgaacacaattttattttgaaggattactaagctatttttaaaatttctatagttagaaaagaaaaactgtttaactgaaacttgaacccaattaaaataacaattctcatggctctccgttttgcaatactttcctattcataaaataagaatgtgcactttacctttttgacccatatatttgatgtttttcaattctctacacgttctttatctctctgtcagtgtggaatattctgatttgttaattaatacccaaagcagcagttggctattaatgaaatgtacagaaaggtatttggtaaaggctacatgaagatgatgatgacaataacaaagatatctgattgaaagtaatctttacctgttaatcttcccttaatgtctccgactacaatggcagacgttgctttcttggatgatgactgaaagattagtttggaatgaataaatttatttttccatggttgattcatagatttttttagaaattactaattttgaaaattaaaccttctttttcagccttttgagttttatgtttctatagtttaggcttaaaaataatgtagacattagaaaaaaactcaagcggtattaatccttatatccctaatggtaaagagcgaggcagctaacaaatgaggtgctggaacactagcaagggagcctgtctctcttctggtccttttgttgtccaattacaggtgaaaagatgctatctgtcagcttgtcattaactcaaatacacaaaggcctgtcagttctcttatgcacttgccaatgtgagcacatcccatattgatgtttctactaaggcttgctgtacttgtaaacagtgtacttgtctggtaactaaatagggacaagcatgcagtaacagtgtgacactgagcatttcagttatatgtcttcttacctcagaattttaagaagaaacaatgctaaaggagatttttttttaaattaaaaacaaaaactacctttccagggtattttaaagaaagaaggtgaattccaattgcacatacatccggtatgtgtgacgccaggtttatccatggcctctctcgccctactgctttttaagtaatatgggaaatgcaaataaacaaataaaaacctacttaaatagactagtaaaaaattgagcaataagggatcattgtataattagattagaatagtgattttgcaaagggttttaaaatgccttaacataggcactgacaaaatgtttgtaggtcttactaatgaatttttatgttttttcaatggaatgtgcattagaatgaggccattagttctttgtggttaaccaaaatctcaagatttcttgtaatgagagtaacttttctttctgggatccctgacaaaccggaagagagtgctgctgaaatgtgggaaaaacagctgtgttataacaggagctgccarccccccacacagctggctgcagagataattaattgtgaagagagtaaggaagtaattcacataattgtgtaaatgttaagtaatttacataattgggtatatatacaaatggatttcttccctaagctatttttttaaatacagaaaaatctaatctacaagcagttgattattaaggaaccaatttttaaataaaccaaaaaaagtatctattctaatgtgtgctatttttcacaaaaaaagtgttttcctgtgactgtatcctgcatcccttgttacaagtgtgtgtgcatgtgtttgtgtgtgtgtgtgtgtgtgtgtgtagataagtatatgatgtctttctgggactatatgcttaatctcactacaattacttttgggttattccatcagcaacacaagtaaatctctctagatactatttatctcaggagtgacaaatatgtgttaagaatgacttctattacccctgcattataagtttattttttccagtatttttttcccctttgatttgagacttagcctaggcatcattcccaaagaagtgctccagacagccgccatgaatgaatcagaactggcccttggaaggaggcctacctgccggtcctctaatggacataacttacttttacctcacagtgttactcagtgctttatctactagggctcatgagatgcagtgttcatactgttttgtttccagaatccctgggtgtgttttattccctcagttgtatataacaggacgcacaatggggtcaggccaatattttttggctcttaaaaggactcttgctgaggtttgccagtacctgctgatctgcagctcccccagcttcataagcagtgataggagtactgagtcagccccaaattaaagaaccatgcatagaacaatgccctgcagcagactcgtaggacaaatctgaaagagcatccccagactcttgaggcatagatacctcctgaaaataagggtctgccttctataggtcattactttggaacatttaataaagcattaccaaaaagaaaaaatacatgtattttataccctcacatttctttttagtcatctttagttttgcttacagtctgattaccccctcactcccaaatccttagctccttacaaaaaggaaaaaaatattttctataacatatatctggaagttttaattttagatttatagtttcacattttcaagccagtatttttctagttccattttgctctatttctagatcattttttctctctcttttctcttaggttttgaaattgctttagatctttaaaaagccattcaccagatttttttttaacttggcctcaaatcatttttactaagtattttatttgagccatcttttttcttttttccatttgttttgttacttttctctccaccgaccctctgctatcaggcaagcatttatattttctattaagtatatagtttctcctaatctctataaacaattatgtgaaaataataagttaacaaatacaatatgacctcaattaactgtcttaatacaagtggaaatggcagagataattccaagagccaattttttattttaatgtgtttttcatatgtacattttaatgggagcttttatgatattatttttcagccacactatttcaaagaaaacaatggagggcattttgtggagatcaaattctggttgagctgtttggacacccagctgcccatcctttctctaatgctcctcccgagcacccagcatcatctctcagaattagacctgaactagccctgacctgaactgattcttctgtccctggtcttctctttctaaattatattttcttgatgagtattttctgtttctaaattagcatcctccttctgggcagtaaaattgagtgagtattagacaaaattgtgaaacgtgtaaacagacattgaatggtttaattaatcagcaagatgtgcagttgaacttgaaagtaaagcatgtgcataataatcctgaagatgattgaagattaattttagtatctgtgatcagataaagacacatttcaatgatgcaacaatgtttaacacttgcaggctactgcaacagaatacttctttagggtcctgaaatcattcttgctttccacaaacttagttgagtgcattaagagattctggctcatagactacttctgcttgttgactcatgccttatccttttcacaggatcactatctagctttaattaattaagtcaggctaatatttaaccagtcttaactactattgctcaccttgcttttctatctcgtgttcattgggcctgtcttagcaaaaaatgactatagaggcaatcaaaattttttatctgatcataagttcaaagttcaagtcagataatttaccttaaatctggattgaaaattaatcatatccccaaagttttggcttgagtaacagtctagatgtttttgtgtatttccttagattcaattctatcaatcctctcctgtgacayctgtaacattcctatagacgattcctgttcaatggtaactcttcacagtgtgtcaggaagagctcttagagatactattagtcagattattcaaataatttctttattgtatattcctatttggcaccaatttgatagtagcatttccttgtgtggatagtttccctttatctattaaaaaagcagtcttttctgactattttctattttcccagcctctactcccttgcttggaattgactgctgtgttaagagctatacaggtttacagaaactgatctttatgattcccaaaacacttggcttttgtgtgaaattgcaaaaattgaaatagcctctttggtacttggtacttattcaaaatgttctcatgtgtcttttggctgcattgcatgttgtgcacaggtaccctagaacttaaagtataataaaaaaaaaaagttctcgattttccaacactgatgatagttccgactttgcagattagcaagaacatgaataagattaattttgcataaatgtttttcatgtgcacaacttggagatcttcagaagaaagaagcaacgcgaatctcatacatataatctttccgtagcttctactgtaaattttggtgaagtgaaacaataaaatttgtataatgtagaaattaagggctgatgactgaatggtcattcactttaaattcatgtatttattgaaattattactcgagttcttggctagggatatagaggtgaacaaggcccaaacttgaaggagtgagtattgcactggagagagaatcatgcttacaaaatattagcaggcccatgttccttagtctctgaatttgtaacagaaaaacacaaattctttccaccctgagtcactcctatccatgaggaattgattgatttaactggcaagtggcaagaatttgacatcccttggttcaagccttccagtggggtaaaggtgtgcttagaagccatgagcacaggggatcttgttctctcatttcttattcccatcaccagctttccccagtagactggatgggtgagaaggaaggctcaattaattgcagaacaattgagtaagtgtcctccatgagcagtttcctcccagctgctgattctcaggaccaagatgaggggaataattagaaagcctgatcctggctgcaggtctctgccctgatgcagtggttgttaaagtaccagttaagtacagctcaagttgttcaactcagaaggcacaataagctttagcctaatactacagttctatagctttatggatggatacagggcaacggacacagcaggtgaagcatcttaatgtcatcagatgagacagaacccacccaggtacacagcttccattgcttcctcacagagtgtgtgcggccaccatggacaagaactaaacacctgggggtcactttaccacagagactctgtcctcagtttccaactagtctttcaaaactgttctggtttagatgcccaggtctctatgctaccctgccagctccccaccccatgtgcagtgccaccaccaacaaggcagacatggcatgctgtattcttcttaactctgtagcttctaaactatgagtgctatgagaaggcaactctgagatggttcttcagcgtaggcctgggttagctcagacctgatgctaaccctttacttacaatgtccaatccagatttttcaacaataaagatatttttatttttattggatgcttttgtatgcttaacattttatctccaatgtatcacatgtgaaaggctctgtggagtcagttacactcctttctctctggggtaaggacagttgagatacattgattgcacccaattgacacgcagagaccagtagacatcagacttttttcatcttactaatgaggtaaattaattatgtcttcccgtgaagaggtctaaagtgatgctctagtgctattaccaatccaagagtggtatcagaagtctcctttcagaaattgagacaaagaaagaggacacctctattttaagaaaacaggtataatgctgtaatatatcactatccacagtgcagtgggatcccaagtgaaggtgtgtccaagtgtgcctggaggagatctgcttctcattgtagtgagaatttgagctgggatgataaggctctagtgaggtgagcagagagagggcattgcatgtaagggctcagtggatgccagaggggagctgggcaatatccaggagattgtgaagcatacaaaagactgggactttcccgccaaattcatacttacattattaaataagtacttgtcgtcatccaagttaattaattgatttatttagatttttgaaagcctttgaaattgtatataaagatagatactcaatctttacttaagaattccattgtgatctcaaaattctttgaactattctcttactcaacaaatatttattgaatggccactgtgtgtcaggcactagtctttctataaacataagggatgctgcagtgaacaagaccggaaaggtccctgctcacagaagggttacattctagagcttcactagcagtacagtggtacagtaaccaccagcatgtgtcgtgatggagcacttgaaacgtggccagttccagtggacatgtactagaagagcgacgttcacattggatttcaaggactttgtatatatatacccaatgtcaaaatatctcattaatataatttttaatattgccattacacatcaaagtgatcagttcgttgcattgtccttacgtaaaatacaatacacaactaaaatgtgttttgtttcttttacttgtggtctctataaataattacataggtggtcttgcctttctgctggacagtgctgctcttgaaagaagagtcaaaaaatgaactacttgacaaataaatgaacaagatgttttcccacagtgagaactgctatgaagacagtaaaactgggtgatgcaatggagagcgacagagactacgttaaatcaaccagccaaaggaggcttttctgaaatgcaattttgctgacatgaggatgataggcaggagccagccagatgaatttctgtgggaagagcagcattctagatagaaaaatagcaaaggtcccaaagaatggcttgttatcttaaaaaaaaaatggaagggttaagtagtaataagtctgaaggagagttgtatgagaggaaatcagaaaagtaggcagggctcaaggaacttgcagacttggaggtaagatgggatgtttttgaagtgcagccagaaactacagaagagttcctagcagaatgacaaaactgatttacatttttagaaagacctctctatctgtttcatgaggtaggagcagaaaaatgtgtaaagactgttctagtgttgaatcgcagacaagggttccagaggctgcttaaggctttcaaatggagcctctgggggaaaggagaggctgccaagctggtcgactcctctcttggctaaagctttgctgggcaagctctgtccttccctccattcttgcattctgcaggcagttggagataaactaaaagcatcactgttaatgttgtttttcaaagaatggaaaaaaaaagaatgcattataagcaggaaatcatgaaatgtgggggaaattgctttattggcccttggctggagtctacaaattggagcattatacaggaaggcattaaacagggggcgaaagggacatgagtttgattttattagccttaggtgagagatgaaactctttttaaagctccaagaacccctaggacctgagttgagaagagacacagcacaaagcagtacaaatctgctgaagcttcagataatcttgaaaagagtagaagacactgcagctctatagctagagaaaatcaagcctgctttgttaaaaacactgatttgtaaggatggctgtccattctgtaaaccagggtataactcttttacgtgacaagaccattaggaaaaatggcaattagatgagccaggatttcagcagtcagtctagctgaggaaagcgttttccatccctactgcttaccggccattttgggggaccatgatgactgtatgagacagccttagtttgagacagttgctggaacttgactgtcatatttgaagctgccaagcagtcaattgacaatgagttatcaggggctgcattgttttaggccacgtataaagctggattggacaggtatgcagagtggcttctactcacagctgggcagctgtggtttcagcagtccttgtaaaatgccttacttgggagaagagtcttcaaattagagtggtaaagatctatttagtagcaacattttaaacatcacatttgaacaagtattaaatatgccaaagttcagcatttcattcatggtctactctttccctctctactcactttttctaaaagctaagatattacattggtttaaaaaaggggaagttacataaaatataaataaaatgaaatataacaaattctagtataataaaaattctccttaaaaatcattacctccaatacaaagtgagattaatctatctaccttcactgtgaaaagtatatagaaaacaaaatttaaaaattacaatagttctactcatccaagatcataaaagcatgtttgtttcaatgaagagaattgtctgcatttacttggatgttcataaaactgggtttccctatctctaattctttgagtataaagtttaattatatatgccctttctaataacatataaataacaaaaagaaagtaaaatccatattatatcatatataaatagaccaatttttcgtcagtatcagattaaataaacagtagcctgtcattccaaaacacatgcacacacaaatcattatatacaatttgtgggaaacwtttaaaatttatttataacgattgggaatataagaaatatgcaaagacatagggcaaatccaaaccaaaacaattcagcagtaacaatattaagattagacaaggggaaatgtcaagtttaaacaccaaaaaaaggtaaaatcagtggtgttagggcgttagctggtaccagcttgtaagagcctatggttaacatatcttcctaactccatgttcaataacatcatattgaaattggccacagtgtgattatttacaccgtagaaattggaaatgatacaaatcagggctttcttcctcccctcctctagagccaattgctaaccatttactagaacaccatgggatagaaatgatgaagttaaaattatttgaaatgcacatgtgctcaacaatatagcaactaaaactataagacaaaaactrttagaaatgtaaggaaactttatttaaaacacatgattatactggcatattttagtttatttcttcagaattgtacacatccaaaaactattaagtaacaatataaataaattagatgtaatccataaacttagtaaatgaaatagacagtctttattyattcaatgtaagtgtgtaaatggatgtctccaccttaaaaatgagatattttaaataagccataattgattcaaaatggagttaccttttttggcatcactaacttagcgrgtaatcttgtaatcttcctcttaaaatttgtttttgtgaaatcctaattttctatttctttttcttttgttgttgttgttgttgttgttgttgttgttgttgttgctgttgagacagaatcttgctctgtcactgaggctggagtgcagtggcacgatcaatgctcactgcaatctccgcctcctgggttcaagtgattctcctgcctcagcctcccaagtagctgggactacaggtgcccgccaccactcccagctagtttttgttatttttagtggagatggggtttcaccatgttggccaggattgtctcaaactcctgatctcaagtgatctgcccacctcggcctcccaaagtgctgggattacaggtgtgagccaatgtgcctggccctaattttcatttattatacttcccttactatagattcaatacaagggaatgaaagcttagacgttcttggcatattttatgaactcctataaaccccaaccaggttgtgagtagttatcgcttactgagaccttaaacacaaacaatattttaatgttcatttattatcctgaataagatacatagatatatattgggagttgagcgctaccatgtcaagaggagcaagcccatagaatgatttttctttcatttttttgcaaaacaactgcaatgtcccattaagacttttcctgcatgttcgtgtcagatgaaggaaagtattttccactgataccccaggttgttagctagtcccacgactgctcttcaagaaacacaagagacctatctgaatgtgggtaaaaggatttcatgttgctttttacttagaaacccagattgtttgtaataagctctgtctgattccttcaacacttagcatccaggcagttttcttcctctaaacttcaaaaaataggagagaattgtaaggaaaatgataaaagcatctgaagttcagcaaaagtgagcctcatctgagctgacttgtcctgatttggggatagcctgaggagagtgtgttcacgcaccttgcagagtagcccttagcagccacttgaataaaaacgaatgaaaagataaacaacaggagtgggcagaagttcgaaatggaggatgtgtgtgaagaaataataacattgtcttgaagattttagaaaatgggagaggcaagaaaaagaaacatagagatgaatcctggaaaaggtatttaaatcttggttgattgttcataaagcccccacccatagcatcttcatcatccctgtgggatgcaaatattgttgttttcatcttacacacacggacattgtgtttctgacaggccaaggggctgttcaaggtcaaatgactgttgaaggcaaaaccactagtatgcagcagtagcagaaaatgaatgcatggcttctgatgataaatcctatggtcttttcaaaacgcctctgttgtctctagggaaattgcctcaaattagaaatcaacacattctactgcagttctaatttgcacacgcttgcctgaaaactttctaatttctggttcttttttaccacctcctctcccacttaatttcatagctacagaggggaaagatagctactgtccaaatagtcttgctaaaggacctcattttcaaaattctttttcccccttcaagtcttcatttgactcacggtgtaatcacattagtgaggaagattttgtacagtcatacctagtgccaaatatcaagttttcctccaaaaagcaaaataaaatgatgggcagaccacctgctttccataaaattgtaccaaaatcaaggaggacaactctacgttatcacgtagaaataacatcagcatttatgagtaataggtctgtttgatgggcaatgctgtggtgtgtaaaattctgatgacaacatgttgaaaaaaatgtctggaagaatgggagaaaaaaagtgaaagtctatggaaagtagtagatttggagtccttttgaagaaaacatgcaagaagctgccagataactgctagataagcagctattgaccatttatgaactcagttttaccaggcgttgagaaggcgagaatactcaaaataaaacctgcatagattccacccttaggaaacttacagtctggcagattcaaaacaatttcacttcactttaagtaattgtaaaattgcctccataaaagcatagcctggatgaaaacatttttcaatattatttactcattttaatgcactcaaataaactttataccaagtaacttctttaaagatctaccaatataaggcacgtatagatcaaagtagacaatgtcagcccatataatccccttctccaggtccattttgattgcttgtgtcaacattggagaccacagtaaattactaatggtccttaaaattccccccctatttatctctttcttttcaatttttctccttcactcctgctactctatttcttgtgttttttttttatctactttttttttttgctcttccccagggaaactagaggaaaattcttcatcctgataagagtttttggcaccagaaaggatattttacctgtagtctgacctacatggagtgagggagcctgaacatgtttccatgagtgttctagttcaatgggcagaaagatccatcaggagaaagcctttgtcactgatggctttgaaattgttcaaatgactttgcagttcacaacacgtgagcttaatcattggtttggctcttctgaggagctgagggagacaaagaagcaaagttattttcccagaggtagtgaggcccaagatgctcagaaaagatttaattgaaagatgccattgctgaaatttcttttataatgttctgcctgtggctttccaatagtaatagtagtagcagttgttgtaataatagagatagtagttgtattgatagcaataataatagctactatttattgagcactgactgtgtttcaggcatgggtccatgcactttacatatattaactcatttaaacctcccaacaacctaacaaggtaaagatgattattatcccatttcacaactgagcaaactgggacatgagatttaaggaacgtgcccaagctcacacagctaggcgatcaccaattatacatttcctctctgcaagagaacagtctatttttcaaaaacatgctgataaaacagcaatcccatttgcttctaaggacaaaccctgccatgcctgagtgttgccattcttaaactccaggccagggcttgcctttggatgcatgtgagcttcactgggctctctgctcaatgtccctcctcagagtgtctccctaaccacctctcttgatctctctccacccctttattccacttgggttttcttcagcacacttagggctacctgacagtgttagcaaggctacaaagcaaaacaccagatggggtggcttaaataacaatcatttattttctcacagttctggaggctggaagcttgagatcagtgtgccagcttggttcagtgctggttatgggtctcttcttggcctgcagacacagacaccttttcactatgtcctcacatggcctttctgtgtgtgtgggggggggggggtgtgggtgtgtgcgcgcgcgcgcgtgcctgcatgcctgtgtagggagaaagagaaagctctttgcctcttcttataaggtcagattaggaccctacccttatgaccacatttaaacttatttactgactaaaagccctatcttcagatatagtgacattgagagttcaacatatgaacatatgagctgataggaatatatgaattgatgggaacatatcaacacttcaacatatgaattggggtgagggacgcaatacagtccatagcggtgacccagcatatatttaataggtcattaatgtgtttactatgtgtctttcccactcctcccggtattagtaatctaaataccagtaaggatttgaggttcttctttgttgtattcctaatacctaagacactgtcccacacatggtagatgttcaatacatatttgttggataaataaaaaatacagagctccctcttctcccctacatgttggaaaatgtgtgtgatctaaatgagggagagggagaaccatctcatctaatcttccaaacttcctgagccacctttagctactgagcacattcacgtttccgtcagctgggaatttaggtgccctgcctatcatcctctggagcccatcccaggagggggcagaaggaggtggagcagcacactagtgttcccagagtggggagagcagatggagaggagttcatgggaacgatgatttacccctgctcacttacccctgtgagaggacactgccctccacgaatcaatgctggctcctcctccaggaaccaggcttctgcatctcacttgccatgctgtggatctaggaacaaatttgcatttggaaattcattttaaagtgtgcatgctgaggttctggtgacatgcagggtaacttctcccacccacgatatctcttgactcaggccttcatgtaggaggggaggagtgtttggcagcaaaactgggtatttcttaggaaggaaatccttctaagctttatggaaatcctagggtgttgtccctacctttctgagtgtggagcagactatctgtgtacatagcggtagtgaggggtgtaatattggagaatggcttaggtaacagccaaaatatacattgtatatccccaaaaagacgaccaaagactcacagggccatgctgctatcattagatataataggcawagcctttcattgatatgtaaatgttagtatttttggtaagtgccttattttatcttctggataatataagatcaaagtaccatgagggcaggatccttctctcattcattttttttcccaagagcatagcacaaagtaggaagtacttgttgagtgaatgaatgatcctaaatatgaaaggatggcattttatcgccattttccagatgagaaaaaaacgagggagcttatcaggtttatatatagtgagtgacaaacttcagaattaaaccaaaatctagtgattcctataacttacaggttattaaggagtccacctgaatgtaagtccaacaagacaggtgtttattttgtttacatacattccaagtacctaagacaatgcctaacatatataaaatacttcataaacatcttcatgtgtgaatagaattttcaaagttcatctcaatatatgcctcatgtgacacttccaacccttcactgccaggtctttcagtctttatttgaataggttcagtaagaaagaattcactcgtgctttagatatgtatggcttttccacattgttgtcagttctaaatcccgaaagttatttttgtatgcttggaatacttcacaatattcacaatttttacaataaaataatttcaggtcttcttgatgaaaaatgtcgatcaggacagggctgaggataatcacaaggcttgaaattaaagaagtctccttaggctgaaatgaatttctagttgtaaaaccaaatatgaatctatgtatttgtgttcctcagaccacttttccagcaggtccttggctgtattttgtatgcatttgtgaaatgctttgttgaaattcagtttcagccaggtctgtagcattctcctggcccctggtctgatagttgtaccaggaacactagctaacaattgcatggcactagtctcagctggatttgttctaactcttttatatgtattaactcaatccctacaaccaccccatttcattactatgcccacttgagaactraaaacactgaggaagagcgaagttaagtaacttgcagaggtctcagagctaggaagtaagacagccaactcggaacccagcagactagctctggagcctacccacctaccctccacaccgtacctgtggtccatcctcaccaaccaggcctgctgccctgagcataacttcaccctcttgcgttctaaaactatctgctgattaagtgagttctgaaatgttttcagggaccaatactaaaatcaactatgaaatagtttcagagattgacctttcctccttttggaatggataagattttcccaaccgaggtctcccatcagctctcctgttcccctggactgtggcacataggagggccagggacttgcgcctattatttcatttcttttgttatccttcatttctagatctcttctctaccacaattatctctcatgttgacagtttccccacagatgggatgtctatttccttgataatacagcattattatgctaaaatctctcatttgtgttattagccagactctgtgcaaaaacgtgtgtatatctgagactctgtgctgttcttagccaccttcttggtcccttctcatgtaaattactagggcacttcttcaatattattattatcatgcccccttaccaccaccacaaaatcttccatcataacccatttttttttcctcctccttaccacattttcagctttgaactcttataatcagatcaggaattacatttctgaacaaatgcaggctttgcagcattgtgaagtgcagctggtccccagcagagagccctaagcccctgcctgaagccaaacccccttttgtggcgagaggtctggattttatttgttgtttttatctttggtgaactgtcaactggaagcagagatgcgaacaccagttatgtcctcccctgcaaggttcatgaccaatactttatagtttctggatatgcttcctaggtttcttctgttggtgtcatttgcctgcatgtgactcactggcaggtggtgatttcatcatattctagacatgtgtcttaggaagctggcccctatcctggctggctggacacatatcgaagttccttagatctaccattgtcactttcatatccattgttaaatactatagatagcatgcaggggtcagccaaattgttctgtaaaaggctcaagcataaatattttaagttttgtgggacagacagtctctgtcgcaactacttgactgatgcagcatgcaagcagccacagacaataagtaaacaaatgggaatggttgtgtcccaataaagctttatttataaaaactgtctttttttataaataaaggagcccatcgtttgccgccccctagtgccaggaaggaacaaggggaaaataaggaagagacccagaggaaaaaaagtgtcaccaaccatatctctaactcatatttatttacttatttttctaagcgcaatcgctaaattatctcgtcttcctaaggcgtatgaatctcttacattaacttagggacagaatatagagttttatgttatcttctgtgagttctttttccattctgtcatgtttcagactttcagaggtaatttttaagtatttcagctgtgccttagatacattaagggacctatagtgcctccctgaggccaagatgatggttgcaatcataaataggttatttctgagttgagactggtaagaacagattatcctgcccagacagtgatgtgccaagcattggcaactttgaaaaatttgcaatttgattttataggagagtttccttaacaggcctgagtttttttcccattgcttttgtgaatacagtattttcccctgctagactcttagtcaaatgttcttgccattataagaaaaaaggaaaactgaaaaacttgaaaataattttattggcttaggaattattttcatgtttgtctgctaatggcaaataaatctaccttattgaatcatacggattttaattccccgggggaaaggtaaccaatgacaggcatatgtgtgtgtgtgtgtgtgtgtgtgtgtgtgtacaagtgtatgcttgtgaaaattgaacagcaaaaagaaattaggtggagaggaaaacattaaagctggtactggtgggtaatcattatatatagtatatatacacatatgccttctccagttttatggaggcagtcagtgcctcaaagacgtgtaataaagagacagcaacaattattggtggcattcatgtaggagaggcttgagccaatgtaaacttgacttggttagtaatctttgccaaaactccctgattgtygtaagggagttgtgaaccattaggtttgcttaaccagaacagcaagtaagcatccaaacagattgtccttggaccataagcaaatgcccagaaaatagccccctgcataggakattaagtacttagaaacaaatgagaaaaaatattacagcaagtcttccaggtatagaagggataaacaaccctattggtatcagaatttaggaatattattatgtctcccactttaaatgaaatacagcagcctgacttggcaaaatttggggaacggttccccttctttgcagccaggttcggtgcttgccctctggcatcccttcaattgtgtatattactggcagagacagctgtttgagctgctaataagattgcaaaataatatcagcttgtgcttcaggttgaagataagagataacattgcattggctgtaggaatggctttcttataaactggatttagttttatctcacttgtctcacttgttacttttttatttatttacttttttttttttgagatggagtctcactttgtcacctgggctggagtacagtgacacgatcttggctcactgcaacgtccgcctcccaggttcaagccattctcctgcctcagcctcccaagtagctgggattacaggcatgcgccaccacgcctggctaatttctgtatttttagtagagacagggtttcaccatgttggccaggctggtctcaaactcctgacctcaggtgatccgtctgcctcggcctcccaaagtgctgggatttcagattacaggtgccatgacgcctggccccacttgatacatttgagggtctcataaggtcttgaaattgagcctgtgaatttataaacagggctacaaccatcctgcagatgcaactttttggcatgccagaatcagtggcacctgaagagcatctccttgaaagcggtagtagataaaaggagatgcctttcaggtttcagacgtggacctcagattcacctccaagactagagttatcacagtgcacaggatcatccaagaacagacatgcagagggaggaaaggccattgtaaggctcaggagaacatagtagagcctaaaaatgagaacaaaatggtactatcagaaaagatggcagtggttgggacataagagagggtaggttcacaggtttgtgggaccaggactcagtcactttcctcgcgctaggctcaaccctcacgatggggaaagtaatgtacttctgggcttaaaattcttcacagtcaactggtagagatatgagggaatttattgctaagtagtagggaaagtgttttcacaaataacatacaggaaattcccatatcatacaaaggaggttgtattatcaccacgtttttacatatgagaaaatagagtcttagaaaagttatgtaccttgcctaggagcatgtgcctagatagtggcagctccaagattcaaacctaaaactccagagtctgaaactcacacagtttcttctctgttctgaggcttcatgcagctggacaggaggttagcctgagacaagaggaggatcattctcgaaggcagagaggctggggacatgactgctttctggaaacctgagctcatggagagaggctgagagtcaggaaagtaggacatgaaatcatttaatgagagtgaagaccagccaggtcagggagtttgaaaagagagttttgaaatatccattgtagctaatatgggagagcattctttgagagtgattaaaatggcgactgaggacacagctaaagtgagaaagaataaatctgtggcagacttgcatatttttggtatgtgcatctctttccgaaatcaattgaacagaggtgggaaaagtagcttggtggataatgaggtagagtggaaagttgaaaagacagagcttaggagtctttctgattggtctaaaattccccagggaaaatcatgtttctttttatgaatatagtccaggtcttaggtctgtcccacggcacaaagttttcaggacattctggacaaattcacacatttccctggatgtcagtcaattccctttgcctctgtgctatcactttccttctctctgctttctccttgagttacctgtcccagctcttcactccacattctgcagcctccgtttagctcctttatacctttgtccagattcttcctaacttattatactgcctcctcatgtcaacttccatcccatctgcatttgggaaaagaagcccacatgataagtgagtccatctgctaaatgtatgcatcttagagcatttgttcaagatcaataaagatacaaattattttgatttttcagctgttgcccaaatccacaagagtacacaaatgaaaatgcactgatttttaaaaagtacaaatagccattaaagtttgtattgttttattctttaaataagccggaaaaatgggaatacgtaggaacgagggagctagcaaaataggcggggcttctgcgtttcaggtggtctgagactgcagtgaccctgaggctggtggacctggaaggagccagggagagatggtggatcccaggggtgggagcaaatgcatggtccaaggttctgaatggcagagctagaccaaaggactaacctgctaaccttgaccaaggagatggcccagaggttttctatttctactgctccatcttttcattataagttcccagtagaaacgagtcatcatttaaaatatcggtgcagcacttaacacataaggaaaaatcaataacattcatttacttacagtacccagagaagaaataaattcaaatacgtaaaaatgggcatgaaccatyctgttccatatcccactttaggactgtcagcaactgtatacattgctgaacgtcattgctcttgtacataatgaataattttctgtaaccctgtgaaggccgactgatttttacggaaagacagctttgtgttaggcggcccgccttccccacggaatcgggttttcccacgccacgttttgatgtttctgagaagtgtgcgccatctgctggccgctgagaggattgacgagcagccataaggagcaccgtgtttcttgagcatgacttaaccaggcaatggaattacaattatctttgggtttctaaaacataatagacatttcaggattcacgtgacttatgagaagtcgcttaattgcctttcaagcagtatacattttttattcaatatgtgtattattctttgtaataataaacratgcaataaagcaatcgaggggttcccacatgctctctaggcagagatggaccccgggccctagatgaaaggttaatagtttggagtgagcactaactctggtyctctgactctgaatctaagtcaggagtagaatagagctgtacaaagaagactgcttgatggaattgaattttgtcccttcttcaatgggggaaaataaagtacagttttcatcaatagattaatgactaaacttggaccttgatgccaaatccaacttgagctccgcctgcacagtctggagatgtacataagagacacatgctcagcctcttagcacatcgttataatccaggcaggcaatactatatcctaaaattactcctctttgctgaaattgagaaaataggaattacccaggggtaaatttggtacataaatgtaccaaatggtatgatttattctagtactgtcttctttttcttgattttcttctttattgggaaatttgtattttgtagttccttcgacactttaaaaattaaactagagggtaagatttaagttttctcacaactaacaaatgattttgattttattgcccaaagccctttatatctcactttcgatgggtctagtccctttggcttaatttagatgtgatttttccttaataattttgaaaatggtggtgctctataccaactagctagaataggaatcacattgacagtatttaatggatagaagcatctcaaagatctttgcttaatgagggcaaatcattagcaatgtccaactccctatgttagaggcgccaactaaggcacggtacttaaatttaaagcacaactcttcgacttccataaagtacatatattacattatatttttaaattacggggtagtgactcgatatgtcactggaatgttttgaatagtgcccccggcccccctgccaaaaaaaagaatgcaagaacactgtcctaaccaagaaggcctgggagttttaactaattcagcctttcagcctccacttaaaattctggaagacagtagtgttggtgctagctgtccttggctgcaagttgtctttacagaagaacttggggtacattttggtgtgaggccactcttgcaagcagcatttgcaggcattaagagaatgcacacagttcaataagctggggttatattcataatcagtctttgtttaatgctgtaaaaatactaaaggaatggccaaaatctctcggtatctggggaaaagggttctttgaaacttttgatgtgtgagcagaataatggaaacttatctgttccccatgcttttaacacacacacaaacacacacacacacacacacaaacgtcatagatcaagatgtaacaggttggaatggggcctaggcttgggaattttgtgactccccaggtgatctcaatgtactgctggtttattagcaggctttgcccaaacaaatactctttctcacctaccaggagaaatcaaagagctctgggttaaacacttgtatgttaaaaccaaaatggtgggcattgcagagtagaggaattaggagaagaaaatagatattgggtcaaaaattggcctcaggaaccaggaagtaagaatggccaatcttaaaagagaaagttctgttgaagagggagcattatctgaagttggaatgactatggaggacaatgacagctgtcccacaggatgtcactgggctgaggaaaatcagactggaagccacaagcccatgggggctcaggaagcctgtttcctgagcagaacagagctgggtttggcacatgcctagtgttccagtgaaatctgtcatttttctgcttccactttttacaaatgagttattcaacgctactttgttgacacatggactcagcatttaaaaaatgacagtggagataagggtctaaggtagtgataggcaaatgaatgatgggcatccatcatctgaagagcttcttaaaattcagatttcccaaccccaccacagacgtctgtctccgtaggtcttgggtagggctcagagcaggctgcttctgaaattttgaggttgtgaggtaagaatacaggtgggagcctgcataccacttgtctaaatatttaaaagttgtaaatcagcctaatgaactgtgaaggaagctctggcctacttccttgacaacttaagcctatacagagacctggaagatcaagttcaaatgcagaacctgaatgtttcggttctatctgctccctcagtgttaaaggtctgtcctttttccttgacaaatatgctttcataattgtctggaaggccggattccaattcagcaattccaatccctcagtgttgagggaaagggccacccgctctgctcttctcttcccatctggctctgtctggaaccacgaagcacctctgtgtgtgtgtggggacaagccagcccaggtgcctgcgttttggcccagtacctcctaccctcatactacatatgtagccacccccaggcatagggttgtgcacactggtgacatgtctgccctctagaagaagcatgggggaaatgggaccccacaggccctgttagctgatacgggccatgagctcccaggtcacggtctaaaagtacattggtttggggctctgcgtgaccatattccaaggatcctgcaaaggaagaggcaggactggagaagggaaagagtgggccttctaaggctcccagggcaggacctctttttgtctggtctaagaggggtattgaacccaagtggcttagatgctgaatccctgggcttagaacccaatgccctggagcattgatctcacagtgctggccagaaaggggctcgttggttgctactaggtcattatcactcccagggcacctgggcagtcaatgaaactgagctcagaaaagtcctgcctttatgatgtcccttccacttccataactttctccataaaataaaaccaagaaaaataatttttctcttgatytcaaatcgtatttaaaggaaaatagaaattttatttttaaagaaattgcatgttttcattgtctatatattgttttgaaatatgtacacgttgtgtaatggctaaattgagctaattaaatgtataacctcacatgcttatcatttttgtggtgaaaacacttaaaatccactctcttaacaattttcaaaaatatttgaaaaaatatagttattaactgtagtcctgtaactatttcctattaattatagggaagtagaaattttaatagtcatctttctcatgcttttcttgacttttagattcaagaaataataaacttgaataaaagagattaatttcacagtaatgcaatatttctgtaaaatttcacaccttgttgactgtcaatcagctgagaactttacacctcattaaaaatccattagaacaatggctgttccattagcccttcagtttatgccttaaaacatacttgtctaaaarcaacattgtttttggcaggctgctccttttgataagtggggacttgctctggtattaactgtttccaggtctccagaaaaaggctcagggtatgtctagggacatcagtgacaacagtgaggtagagcaagtcaatactgtgccacctctgcgctagccagagaacctctgctccaaggtgagttggttccccctttcattaaggtcctcaggccccagtaaaatccagatatggctttggagaggaacgctgtctgagtgaagctccctcagtttcataaccagcttagagcttctcagctctgacctgcctgttagcatggctggggagcccagtggtttattgaactggctaataacaaagattctgagataacgaaacagaaaacaggtaggttttgatgaaaaggaaggagataaggaggataagaggggtagtagggaggaatagtgggagaggggcaaagaagcattaaatcaagatttggagaatggctggaaacagtggcagagactcaataggagagtgaccctgacagacggggaggtggcaaaagtgcttgcaggcacaggccacccaacagttatttcrgggactgttcacaatctcatctacttcacagttttgccttgtcctaactcaggtcttattagagccagaataaattgccttgcatcgtcagaaactgaccattcattcctgtggtcttctttgagatttttagaatcccaaggactaaatatccctatccacttgcctttgttcactgtattggatgatgtgccattgcctgtctccagcattcactgagagcagtaccccaacatccaacacatctttaaatgccaaagggaagtgaaaatgtcctgacttcttaaactctaacatagcattcatcctattcttatattttttgaactttgcatcaaaacatacataaatgcaggtgcacaaattgtaagtgtaaaagtcaatgaattttcactaagtgaacacacttggctcaccagaagctaaagaaagggtgaactagaaggggactttgtagattacacttcctgacaccatcattatttaagaaagaactgtttcctaggtatattttaggaccttttatctggtgatatctatctactaactttaggggtggggtggaattgattctttttacaagattagtgaagctagaaacaactagcttttaattcattaaatgtaacctactttcaagtagcttcatgtgactgaaatcaatctgttttattttccaaaccagtggaatacacacagggtcattacatacattttgaaagtcttctgtttcaaatgtattgtagattaagaaacagaatgtggcagggcacggtggctcatgcctgtaatctcagcactttgggagaccgaggcgggtggatcacttgaggtcaggaatttgagatcagcctggccaacatggtgaaaccccgtctctactaaaaatacaaaaaattagccaggcatggtggtgtgcgcctgtagtcccagctacttgggaagctgaggtgggagaatcgcttgaacctgggaggcagaggttgcagtgagctgagatcatgtcattgcactccagcctgggtgacagagcgagattttgtctcaaaagaaaaaacaaaaaatagaaaaagaaacaacgctattggcacacccagaataatcactattggacttctgataccaaaaacaagggggatttcctcgtttttaagttttatgaaatgaagtaatattctgtatactcttccgagtttagcttctttgagtaggtttgtgagatttatccaagtgtggaatggagttataatttattcatttttggttttgggtgattgtatttttaaaattaaggtaaacattaaaagttagggtttaacccactactgggtattcacccaaagggaaagaagtcattctacgagaaagaccacatgcacaggcctgtccaattcacagttgcaaaaataggcaaccaaacttgttgcccatcgaccaacgagtggataaagaaaatgtggtatatatgccctatggattactactcagtcataaaaagaaaccaaataatgtctctggcagcaacttggctggaagtggaggccatttattctaagagacgtaactcaggaatggaaaaccaaatatcatgttttcacttacaagtgggagctaagcgctgaggatacaaaggcataagaatgaataatggactttggggatgggggagagattgggagaagttgagaaataaaagactacatattgggtacagtgtacactgctccggtgatggatgcaccaaaatatcagaaatcaccactaatgaatgtgtccaagtaaacaaaacccactgtaccccaaaaactatagaaatagaaaatgaataaataaaagttagggattaaaaagaaagtgggacatggtcattccagaagtctaaaatattataagctatatataaaatacaagtttgtaactattttttgagtacctgcaatcagcaagtttgcattaatattactgtttactccctcactttttaaaacaactaattttctatttcctattttaagaccttacctaagattgctgtcctgtggaatggttcctagcccacgtgaccttgtctgtgttgaagcatgagtgaatacatactaccatctactttagtgaatgttgatgataaaatggccaatttcatgtatttgtttattttcaagaaaaccttagagcactcgttctcaaactttaggatgcatcagaattacctggagtgccagaatcccctgaagtggttgtaagaactcattgctggggccaggtgcggtggctcacacctgtaatcccagcactttcggaggccaaggcaggcggatcacttgaggtcaggaattcgagaccagcctggccaccatggtgaaaccccttctctactaaaaatacaaagattagctgtgcgtgatggcgggcacctgtaatcccagccacttgggaggctgaggcaggagaatcgcttgaacccgggrggcggaggttgcagtgagccaagatggcgccactgcactccagcctgggtggcagagacaaattgaaaaaaaaaaaaaaaaaaggagtttctaggccccatccccagaatttttgattttgtaggtctgcggtgggatccaattatgtaccgtctaatgagctcccaggtgatagtgacgctgcagacctggctccacattctgagaaccactgccttagagcctgcacatcaagtcacgtttatattcctgtgccgtactcccctggtgaggattcctctggtcattcatgcatttacgtttttaaactccttggaatcaaccaggtagagattgtactcttgttgtcgtatttaccatcctaaatcattagcatctattatcttcctctgccctacaccacaactctgcttgtaacccatttggagcgtgttttctatgttcttgctttgtttacatattggtggccccaactatttatcagcttattaaagacatcaggccactatttgtctatatccctgcactgcctagcagggagcactgcagggactattgaattcatgcactgtattctctgctggcccattgatttcatccttatagcccctgcttctcacctgcatgtgtttttttcacaatttacatactgataaaatgaattcttgcttcttgctcatgtaagaatatggaggctgggcacagtggctcacacctgtgatcccaacactttgggaggccgaggcaggcagatcatgaggtcaggagatcgagaccatcctggctaacatggtgaaaccccctctctactaaaaatacaaaaattagctgagcgtggtggtttgcacctgtaatcccagctatttgggaggctgaggcaggagaatcgcttgaacctgggaggtagaggttgcagtgagctgagatcacgccactgcattccagctttgggggccccaaaacccaggagtgagactctgtctcaaaaaaaaaaaaaaaaaaaagaatatggaagttataaaaataatctgtgatcatataatgactgttttccccaaaaagggcattactttcctgcttcaaagtatgtatttcttaactaaagtgtttgtgggatatggctgcgtgttggcatcacctagagaacttawaaaaaaaaaatgaaaacaaaaacaaaacaaaacaaaaaactgatcttcatgtcccagaggttctcttctaattgatgtgggctgtgatctgggcatagagattgccaaaattaccccggtgattctaacacataaaaatgttttagagtttcttaagtactttttttcctgatgagtttcaagagggccactttttttttctggaagattattttcagaaacacctagcccttctttatttgtatctcctgtagatgttttccttctgagtttttctctgtgaaacaagaaaatataatgaactgtcatttgcacgttgcacaaagcatgaactttatttggagtcttagataaacttgttctgatctagaaatgaaaaataatgaactctgctgagttctgcatttmctgtctgaagttagctttaccataaggatctggtgggtaagtgtttgttgttcttgtcattaattattggaacagagttgtttggagtagatgattcattgtggaacaaatcgtctgattttgagggacattttccattataaaataattatacataaaaacagaagtattgctttaatactaagatttgtaacaatgccatgtcattctggttgtaatgactctgtgtctattccactggtttggaaaataaaacagattgatttcagtcatatgaagatacttgaaaataggttacatttaatcaattagaaactagttgtttctaacttcactaatcttgtaaaaagaattaattccaccccactcctaaagttagtagatagatagatatcaccagataagttcctaaaatatacctaggaaatagctctttctcaaataatgatggtgtcagtaagtctaatgtaagtccattttattttaccctttctttaggttctgcccttgtatcttagaataatgaaatatgaagtgaaatttggtgtcatggtttacctgtagccattttataatttagattcatgggtttacattacttactgaaactactggggaaacattaacaacacaataggattcctagattgataaacttcaacactcaagctatgacagttgttctcagtctcgtctttgattcaatgtaaaaatttggacaagttaattagctttcttttgctgcgtgtataggggcaggataaacttgagaattcccacaattattcaacccagatcaaagatatttgtctcaggaaatcaacaatattaagaaaaatggctttttgaaaaaaaattaaaaaaatgtttagcaccttcaaatatcagattcacatcctcatcatcctcacttagagattttaaaactaatagcarttttgtatggcacatttgcatttacaatgcatttttgtacacattctattttcccctaaacccagggagactggaagagcaacaatttacatatttgcgtatttttagaaagtgagtcttagaaaggttaagtgactaacctaggctcaaacagccagaagtgtgtggaacaaaggcaccacacagctttgctgactgtgagctcactctttctactcctccagctatgccagctatacaatagcaacttgtgagaggtgttaggtgtgagggatagtaggggggtaggggtggggaggggaagaggaagcaaagtcctcatactgattgtatttttatcacttttctaaaggattttatgttttacagcctatttgtcattggtggaaatatctctacactggtgctataaacagcaaaacatgcacttgagactccctgcaagcccatctaagttttaagggtaattgagaatagcagcacttgatacacatatcttcatttactatatagtgtgatcaattattttccctgatactaagggaaaattaaacatcttttcattggttgttgcatttctttcacggtgtttttaatgcactttgcgagcttttgtagttctcaaaactggccactagatggtagtgtttagttagtattgtcgcacatgttccattgtgggaactttgattctaataggaaacatttcatatataatactgcactgaaactgtttccccagtggctgaggcacacgataaaaactctgtggcttgagccttctttttcttttttaatgactagacctcccttcattcaacacagacctttcttccacatactacttattcagcaattcatttttctccccataatagtctttttaaacaccccacagtgagggagtgttaaaagtcctgcctttcgtagaattttgctctaaacttctgagaggtaaagcagatctggtgccaagatgatgtgttctagggaagtacaaggacaatagacttaaagacctgtgctgccagcttgtgaataattgaagatttgtatctcgaagtaaatttcagagtacccctgtacttccttgggtatctaaaccaaataagacagaagttgtagttgcctggtatagataccacattgccaaaattttacagtattttggacaatccaatagatgtcttctctctgctttgtttaagccttctaatttccccagcaagacaaagcaaaacaaaattaattcacacagcctgtttgcatgatatggtccgatggtttactatgctatgtttgtcattagtcacccaagcacagaatctaaaagtcacttataaccatttcctgcccccccatgactgctgattcttccaaaaccataaatctcctttactaattcacttgaataaccaaacctgcatttcaggttctcattctttacacacccaataaaaaatgagatgccatctgttattttattcattaagtcaagtyctgtttctcatgttctgcgggaattcttcccatgtggttttactgtttgtttcactttcttcaatttccctcatcattacacataagcatttataaaatacctcttcataaaatccactccagtcattctctgcagttaactccaagatctccaagatcaaaacagaccccaaagttgtcaatgaaactgttcacttgcacagtgcaggggctgggggtgtggttacttgggtgtgtgaatatgaactttcggttgtctgaggacaacaggaagccttgtttctggttgctatcatattaaactttagttaagatttttattgtttatgagatagggaattttttcccctgggggtcaactggggtcaccctatttcctgagggctaaataaaattggctgcaatccccatcgtacagattgtgaaaagttctgctttctctccaaagcttttatgaatccttgatcacaccaggccacacatctctgcttcagccaaattggttgcgtttaggagttctctcacagtagctgtcatcatctcttttttccataccacagaggctcaaggtagaactgagccccttccttagttttcccaaccaccagccttccctctgccccaacaaaacaaaacttgttcacacatgggatttctgcattgtaccacactttactgatggtttgaagaaatggaagcaatgttcaccataatgtgagaagtgactgtgtttagactttcatattcttaaaaagtcagttacccagtgatttctatatggaaggtgttagccttttgctaggtttgcttgggttttttctttcattcctacccttccgtacctctcctacttcaaaaattgcttataggaactccagatttttcttacttaatggcatttagtgctttacgtctctcctgctccatccaccttttaactcccagaactacgcaagtgctcagcagaacaaaatgggctttcatgtaatattaccacaacttgatagaagatatttttggttataaatagcttttaaaaaaaattttttggtgattacatgtgggtacgatgactaaattgaattttgctcttcgtctcatacacacaaacacacacacacacacacacacacacacacacacacacacacaggcatttatatatagagagagagagatggagacttgttctgtcatcccagctggagtgtagtggtgcaatcacagctcactgcagcctcaacctcccaggtgcaagtgatcctcctgcttcagcctcccatgtagctgggattacaggtgcgggccaccacacctggctattttttattattttttgtagatgcggaatctccctatgttgcccaggctagtaactcctaggtgtaagtgatcctccagactcggactcccaaagtgctgggattacaagtgcaagcccccatacccccagccttctgctcctatttgacctagaaattccatatagtagccatagcattcattcattcaacaaataattattgaacacctacttgcaaaaaggaattcagttcctattctgttggggtgataatctagtaaataataataataataatgaaaagtgtccatgcactcttctaggctccaataatccctatgaagagagggtatgcttaaacaacagatgcttattttctcacggttgtggaggctggcagtgtgagatcggggtgcctgcatagtggagttctagtgagggctggcttcccctatgccttcacccaaagtttatgtgttattaatatcagcagccctctatctctggatgtctctggtgccttagaagacatattctctacagttaaagagtgatcctcaagaacggacagggtaaatatattttatattgctaaatgcccccatttgaagggctatataccatttcatgtagcaaggagcacttaatggctccagcagaacaaaataactctacagaaaatttttatttgcccaaagcatctaacgagctggtccttccatgcatgtggtggcactcttgtgaactgcttcctgagatcctcttagtgcaaagccaacaacattcagtacatttccttcacttgccttttggcatgtccatgacaatatttccagctgatctaacttctagaaaatctatttcccacaagcaacaggtcttctattttcctgcttaagagtgtttatttttgcttttttcagcagcttcacaacttctgacttggttgactttttttttttttttttttagagagaatgtctctcctccatctgcgaagtgctgcattttaggtttggtctgacaatttgatgcaacggctcaggtatatatgacaaggaaatggaatttctatcctcgaaatcaattctgaacaataaaagctgagaggataagtttattcaaaggtgatttggtattgcgacaggctgctccaaatcagaactcagcaacctgattttgaaaaatttccaagttcatgaaaagaatcactttgtacataagggctttctacttgtttgggtttgagcataactagatagcttagtgggatatccatattcttgcatttgatgatcacatttggcatctaaatattatgctgttttcaaatgaaagaaatactgctgaataagagagctagaatgaattacatacaaagaaaacttaaaataagtgtcatctaagaagatgaaaaagcaaacaagtacatatgttcttaacttttgggggcttgcctttaatttttttaataaggcaattatctgctattagtaattataataggagctaaaatccagttaatagtcactgtgtgtgaaaccctgtgctgagcaccccagggtatggcctccaagaggacacacaacactctttttggagaaagctgaagacagtgggggcagtgactgaaggtcacggagttggtaaaaggcagagccaagctcaaacccacacagccacatacctgcaactgtgttgttagcactgcactccccagttaccaaagccttgtttattttccagtcctaaactctgcttaaatgtgcatgaagagtaatttcattttttttccttttctagactgtaaatttgtataattggatttctacaggcttttgtgtttctggtgagattcaaaatggatttttcaaagttacgatattcagtgactcctataatctagaaatttctcccaagacaccagacttcctccctgatcttttgactaaaagcctggtccccagctgtattcatttcctagggctgctgtaaggaagtatcacaacctaggtggcttacaacagccaaaatgcattgtctcacagttctggaggccagaaatccaaaagtaatgtgttgtcaaggttgtttccttctgagaaccgtgaggcaaggatttgttccaggcctctctccttggatagccgtcttctctctttgtttcttcatagtgccttcctcctgcatatgtgtgtgtctgcatttccccattttataagaattccccttcacatyagataaggcccactctaatgaccttattttaactcgattacctctctaaagaccctatttccaagcaaagtccctttctgaggtactggggttggaacttcagcctatttttgcagggacacaattcaacccatagcaccagctctgaaccagggtagtgcatggaggtggagacctagtaccgtgctaaggaccccagccgacagtgtggtccgaggcaagtttcccttctgcccaataggggattggattgactgatttctactgtaatatagtacaagtatatatagtagaagtatatatatagaagtaacatagaattctatttttatagaatggctgtaatttatttaataggttttctcactgaagtaatttcataaaagtttttggaaagttggcttcatccttctactttcatgcatttgccgcagagattaagtgtctgccaggtattctttcagcgtgatccaccggggaacccacagacccagcctcctcccactttccttttccttctgagatctctttattcttcctgttctgtgtccaaaaagaggaaccaactgccccctaagtctatcctcacatatagagcctcttacatgacaggtgtcaggagaaactaaaaacgattagacttagaaggagctaactattaaatggtgaatgctcaatcaatattcattaatcaggaaggttgaccattgactttaccctctgtgacttcactggctctttcacagcaacgattcttgagaaaatacatggccaagccttacattagctgatctagttttcagagccccgctaggatatgagtcctggtattgcagatgaggaaacagggtctcacagatacacagaagctcctctgggtgcacacagtgagtactgggataggcaaaggctgaactcaggcagcttctctccaggatccaccctgagtgatgagctgtgtcccaggctggagaagagccatgctgcccactgtctgggcctatctacaagctctttcattcattcttggatttttccagctgaaaaaaagtgttatatgaaggatcagagatggcatcttaaacttttttttgcacaattcatcattaattcactgttttttaaactgttgtcacaaagagttgttttgaatgccttgatgaactatgttttgtttgttttattatattttcacttgagatttttactgtgaagcatgctattttgaagacaaaatttttaaaaatagagaagggcaagaagaatggtggacaatgcaggaggtgacaattggtataattacagtaaacatttataggtcagtggaacataagccctgagggaaggctctgaaagcggacctgcaagcaggagggagggagggaaggagggaggcagccctcgcaggctgccgggaagcaccagggatgtcgtgcctcactgtgccagcctcacagatggcatctcagcgacatggctgttcttttgtcttttcttcatgagcatcttagagaagcgcatttatgcacatttctacctacaaagttttgcctcagtgtgactcatcttctttctgtctcagataggattactcttcaaaggaaagataaaaaaacaagttctgaatataaagatgaagccaactgcagggcttgttgaattacctcagagatagctagagttgtctgtgtgtgtgtgtgtgtgtgtgtgtgtgtgtgtgtgtgtgtgtgcgcctctgtgtgtgtgtctgtgtatctgtccatgtctgtgtgtatgtctgtgtccatgtctgtatgtgcatctgtgtgtgtgcatgtgcctgtgcatgtgtgtctgtgcatgtgtgtgtatacacatgagtgcaatgtcccatattggcaaataccacatggtaacgtcctgcacgccacaggagctgtatatatgagctgtattttcatgatggcccactgggatagggattaaatcagatgatcaccatttatacctaagtagtaacacttaaaaatgcaattgctctctgtcaccacggcttaatctatgagcccctaaggggaaaaaattcttacattaaaaaagccatttcatatatagataaatgttgaataggcaggtgttgatcagaaggtctaatccccatccacgtgaaatgaacaagtcaagcagataattgttttactagagctttcctttgcattaaatgtgcctggaaaacatttctaaaaccattcttttctttttggttgaaccattatgaatgaatcttcatcctttaaaaggctagatgttcatgttcaactgttttggcaactgacctaaaccaatattattatgaacacattttggttgttttggttggacattggtaactgccagtgaagttggaggtgagaggagttaactacttccttataatgtcaccacctaattagaataaaagcatcttagattaaattctgatttacataaggacatttattaactaaacaattattcagcaggcatgaaataaacaaatcatatgactagttctctctctaggtgcttggccaccgtttgcaagcttcccttaaggcacaaaatccaaaattccagagtcaatatttcatcatcactatagacaaaagtttgtggtattcacagctggacgctggacatctcccaggacgtggttcctgagtcattctgcctctgagtgtgttgctcccatggaaatcatgcacctccacggaactcactcaggctcctcggggactcctgagtctgcagtcagattgctagtcttgctctgatttcctacctatcggacattccatttgactgtcttgccactgaactcaatgggtgtaagctgactcttcttccctgcatatcagcatcctcctgacttccccacttctgtgaatgtcatgatcattctttctgccacctaagcttgaagcctacagtcattttttaacacagccaccttcagctccaattccaattccaatcagtcactcttttctcaaatctcccttcataccagttcctgtccttctgtctcttctaccctaagccagagccatatctctgcagatcaagggcctttttgttctgtttcttccccagtcaattagtttacatgatgccaaacccatcttcttaaaaccacctggattagatcactcctctgtttgaagatttccaaagaggccttattttgtagtggaaaatgtccaaactcctttgcatattcacttattctcagcatgcttttaccaccttgcgttcttctccttcacggcacaaacctctatgccagctggattttccatccataatcccccaaatacatcacatgcattgttgcattggccacccttgttagtgctttttccatgtggtgttcttactttcctccttcactccatgcccacttcctcaaaacacacacacacacacacacacacacacacacacacacacacacacagcttcttggagcctcaaagttggttgctagtattttaagtgcccggaatttgaaatgaaaaaaaataaaagtaaactggttttaaatgtaggcgttgccacgtattggttctactgtggcctcagacttgttatgaaatatttccaagccttagcttccacatgagtacaatgggaataatgcctaccatcctattgcccatccttaattaatcttagttccgtttctgtgccacgtttcctccccagggaagccctttatacccttactactcatggatttatctcttctctgagcccatagaactgagttctgttgtcactgctttagtaaagtcaccatttgcttgtttaaggtccctcttctattttcacttattgtgtttcggagccacacattgtatcctatactagactttgaaaatactttagttgcagtgcattatttttgtgtagtcagagtacccagggcagtttctcacacattctctcgttttgtctcataacatcccaggagctggatataatctgtgatttatgaggagagaaagtgagagacagaggtgtaagtgagttgcctaaggtcactcagagagtgagtggcagaagcagcacttgaatcaagtcttaggattctaagcccggggctgtctgctccctcctagacctgtaactttagaagcaggaatttatttcatattgcttatatttcagtatttatttttaacccttacagggcccggtcttgtgactgactgtaattgagaaggtactctacaaatatttttgaaagaataaataaaatgaatactacagaccatgttaataatgtcaaataactctgggagtttgagggataattctgtcaatacgagttgagggtgtgcttggcctctccatcatttaccctgcttttatgagggttagcagcacaatgtcttcattctaaaacacagaatcatgaggttaaagaaagcatgcaatgccatcagctgagaagaaccagaattcacagtgcaggttctctaaagtggttttgtgttgctctcagcgccgtgaactcccaccattatattcatagctttttagcctttggctaagatcaagtagagtgtttgttctcctggcttttaataagtaatgtgttctccatccaaggacaacatatttaggctgtacatgcattacgaagtattaagctcctgtaacagtaaatttctcaacaggagatttatgtgaattctcttggatgttattctgttgacattaggaacaattaggaatataaaatgccatggcagatttttctgtgatgctggacgtactgtcaggactctgagtctgtgtactcggaagtcttcctcagacagggacaaggcgcattctctttcttaggaagagaattaacagtgcactcccacctccctgtgctcaccacatgggcacacatcccagggcgagggtggagtgagctcagaagaacccacgctgagcacaatgaaagcaaaattattatcagagaaagaaacagattgcagcaacctgggtttaacaggacacatagtagtagacaggaagtttttcgtgatctataacacattttcatattagggtcatgttaatttcacaatgaattgcatattaggctcaattagagaaacaataaagaaggaagacgggatgacagaaagcattgaagaggaggaagcagaatggaggcagagggtggaatcaaaaataaggacaaagagaggaaggggaaagagaaagaaaatgagaagtaacgtcagcagctccgtaggttctgaggtgagttagctggtcgtaggtcaacagctttagtcacacatcctgttattcactttgggcatcagagcacattttcactaccctttgaaatttccatacagtctacagcgattttgtagcaatctttctttaccgggaaattgcttatctgcttttcttttcaatctttgaggtcaacttattaaaggctttagtttcacatgaagcccgaaatattttgaaggtaagaaaaaaatgtgcctttggtcttaaatatttccacttaaatcttgattctgggctactttaataattccaaaataagagtgagtggcttcttttttcaataactgaaatacaacatttaaaaacactcatgtaattattttgctgtgttcagttgtttgaaagtagacaaggtttgatttgacagagctgtgttttaacctgggctctacatgtcactaaactactgtcccctgtaagctcctgtttcctcgtctacagatagaggtactccagtagctctccaggctctgtgtgtctctgtcacaggtttggcataaagtagacaggaatggtgtcagttcctccctccccaaactctctccaatgacactcccaccaagtgcagaaacgtacagaaagaactcttcctgcttttcaacttccattgatcacactgaaagaaatatcacattagcttataaggctcaaaattatcttcagtgctatagctctgtgtactctaaaatcagagcaacataactttggttctggatgaaatcgaatcaggacctgactctactcctagaagaacgctgaccccaaactcctgttttgcagaaccctgaaggagcaagtaaagatgccagccattaaatatgaagaccttcagagacctagaactaatggaactaaatcaaggatttctattttatcttagattaaaatgccatttatatgcattcagggcatagttttcactcccatgaggaatagattcatacctgtataaagctgggaatataatgactaattaaatatactgtatgacttcaatatagccaagaaaattacaatcattccaagtaatactgtttttccccagacacaaatctgaggatcttgaatcttagcactggaaggaatgtagacatcacgcaggctcatcacttctctggcacagaacttgacttgccttgagcacatgtctggtagcttcttcctgggaacatagatgacataacgcatattgcctttccaggcagcttgatctgtcatgagacagctctggccttttagaaaccagcctttatactgagctgtgagcctgcttctctgtattgcacattttttgttcttaattctgaacaaaaagtttttgtgaattttcttcctggaaatggtcttcaccacttgaaacaactgtcatgcccatctgagcatatttcttaggtgaggcttcccagtttgggagacgcttctctcataaaatatttctgaattcatcagtatctctgttcctataaaacgcgtggctgtctacttcaggcaaatcctaaccaagctcaggtaacagtgaagtgattgtttgctgtgaaacagtattgtactgttgaagttaaagaggtctatgattacattgtgtttattttggattttgcattattgagtattttttactttattttctttttgtaaagcccatatcactacctataacaagcttttgataagtgaactttctaatttttcctattctatagctatgtaagggaatctttaaattttgccaggactttctagcctaatgcaacaagggaggttacattaactataataatttaaatttcattagttttttcccacatttgctgaagcaattcttctacacaatctatttcattatttctgggagttctaaatgtgtcccacaggaacacatcccccttcttggaaccactgctcttccaccagaaccagcagctctctggactccccaaggcttattaggtctcattgttacccagggagtcaagcagctatcacaaggccatgctttggctttgtagctgctccaatggatgttaaaatttctcactttgttcctgatactgtacggaattatatgcaacatctctttacttaaaagctctctgcttctcccaggatccagagattcatccctggaaaagcattcaagtgcagctgccatattccatttagaatgcctccttccttcagacagccaaggttttgttattgggctcagctctatgtgcccagctccttcttcagtacaaggagctctctccaaagaggtcactaaatcccctgcaaatagtctttaactagaccttttcaaaccttgtctcttttttttctttgaaatgacactgtaccatgaacatttttatgaaatcattaaacatgttaaacttcatcaaagccatcattttaaagtcttccatgatgtctatcttatagagatacaccatactagaatgcatttttttcatttttctattgctgagaatgttgggttttatacatagcttgttattttaagtaaatgttgtgctttaccttgttcctattatacttttaattcagcctactgttagcatctgtggatgattttctatgcttatatgtcactcaatatattagcatcattcccagcttttggctttacatatgcatttttaagatgtgtctcttaccttttaaccatcaaatcagattttagttgcttgatagacccagcttttatatttcagtttatgccacctctaaggtcgttgtagtgagatgcctatataaaagacatacaaattcaaggagtgaattaaaatctcacttgaaattttaaatgtcactgaatattaattgtggtcgctaattggtatattttctagtaatcacttcaaaagctcctcattaaaaataaatcataaaaatatagaattataagagcttttaggtatagttcaatgatctaattccatccatttatctgtccatctatccttcagcaagtcatttatcaccttccttctgtatattacagatgataataaagacatctgggacaaaaaggtaagtcacagacctacccatgtgtatgggtgatagagtagtgaatacaagtgacaaagggtgtgattccttctgtttgagaggtgaagaaagtattcccaaagcaagtgacattgaatcagcaccttaagataaaacgaagaactcagcagaaagaaagtgaatgggaagatgtggtaataggtttaaatggacatggcatgtcggcaactaaatttctgtagctccagaatattctccccagtcccctgagacgaagttacagagctgtgaatccggtagtgaaagccttggtataaggcgcataagaaatgtgcagattatctaccatgaaatagaggaagaaatcaaggttattcaagtagaggaatgacacgttttagaaagacttttgttataacgttatgggaaatggattataggctggaggcaagagataagacattgtcagtgtgacagaatattttattaataaagcacataatttatactcagatctatgtgagatgagaccaattcatgtcaacatgtccaatgtttttgaaaaaatgctaagtttttattatcgcttttgtttatttccctgtgaaatatagtaggctagccctctatttctcctggcgaaatctttagataggtggaaaaaaaaatgttgaaaaagggcatcaatgacctcttttatcttggttttatctgccttttggaagatacttgattcaaagctatgaaaaagcatctcaccaatcccgtatttcacttggttggacgatgtgtcaagagaacgcctgaggcttcctctgtccgttaacaggccagtcatgagtcacagtctgaacatgaggaaatgttcatgtactttttcatagtcatggcaatgagacttttttgtgcccaaagtactatcctcgcctaaagtccctgttaaaaaggttattttctgccacaggcaggtagcagaatgtcaagatccaattccaagtgcttcatcatcactcggatagcctcaggaagctgaggttttacagctgcctggaacccacatgcttcatgtgatgtagagcagccctgttaattagctgtttcaggattcttaatgccctatggctttggaaacacttgttagcccacagagggaggggaagagctggaagcaattggactacagcctgaatttattttaattcaattcagtaaccaccttatctttctaaatccctgtttagaatctgttgaaaattatagttgatttaagtttttctcagtgatgcatcctgagagaagagggagattacaattcaaggttttctgaagccacagaaatgtggagtgctgcagaaagagctgatcgatggaactttccagacacatgtatgcaattttctaaaggctagaaaatagatgccggggatggggagaggggaggccagttgatgtggaaaggcttgtgtagagtgcccacgagtctgcatttctgttcacctaccagaagaaacactgccagttccccccaccctcaccccccaaccattctcactgcagagagctggcactcaacaaactcataatttttctcaatacaattctcatgacataacctgaccaaccatatgaaacctaatgaagaaaacaaccattgccattggcaacaaatgcaggagttgcatcacaagtaaaccacatactttacttcacaaatttgaacattagagtaccaccggcaaaaacatggtaccatccttcggtatggatgagatatcagtttacaaaaccttcactggaaagtccataccaaaatttttaaaatgcatgcaaaagctaattgtgttgacatctttcttatcagagctattgcaaattattttgtctagaggtggttcttaaaacagccacctgtctgtccactaatcatgtacatagcatcctcttcctcatattcatcctctgaaataccaagaggtgaaagagtgtttcagtagctcaccattcttggctgttacataatgggtcagattcctttctgagtagtaggagaggtcagtgatccagatctatatatctttgtgctttttccactaatacattcttagaacctagtaggtgctcaataaacgttagctgtatgaatgagttagtgaatcaatgaatgaagtgttaatttttagaaatattatggtcagaattttactaggaaaaacatttcttataatcacaaatgaaagctaggtttactcaaaattgggaatagtaagtagtctttccatttcccataccacaggtatgcttgtattcttcttatatgcttatgaaagaagagaatgtggattaagttataaactatttgtacatgatattgtatatgtaaaaatcatgtcagttttgaggccaggatttctttgtattgagtaaaattttcctaaatatttgcccattgtattagttcattctcacattgctgataaagacatactcaagactgggtaatttataaagaaaaacaggtttaagggacttacagttccacgtgactggggaggcctcacaatcatggtggaaggcaaaaggcatgtcttacatggtggcagacatgagagaaaatgagagaaaaaccatgaaaaaggggtttccccttataaagccatcagatcttgtgagacttattcactaccatgagaacagtatggggaaaattgcccccatgattcaattatctcccaccaggtccctcccacaacacatgggaatcatgagagctacagttcaagatgagatttgggtggggacacagccaaaccacatcacccattttaaaacaggcttgatatcaatttattgctagaaaactataatttgtattttcttttacatttttaatgactgattgtacatttgttccctcaaaagaggctctccaaaatactgcctaattcctatgttaatagcaacccaaacatgttttcaatactaatattaaaacaaattagcttaacaaatacaaaaggtaatgcctggtttatacaatacggatttgagaaatgcaggtttcaacctgttccacaccatgcccttcattatattcttctgccagagattttattctttacttttcattcaatcagaaagaattgagaggaatttgaacccattctgcctatttagaatatcatttgtactgactttaatcttttgctcctaatccatgaattcctgaggtcttttatttacatccataaatttgaaaagcacaatccccttttttttttaaaaaaaaaaaaaaggaagttacttttgggaatcagagacatgtacctctttgttctcttggagagctgtgggttatgggagggaactcctcatcctgtttcctgatatgcagtgacttctctcttacacagatgagtcctaaaacctttgtgagctcagacaagttggctggttttatttttatttttttatttttgagattgtctcactctgtcactcaggatggagtgcagtggcccaattaccaactcactgcagccttgaccttccaggctgaaaccatcttcccacctcagcctcccaaatagctaagaccacaggtgcacaccaccatacccactaattttttgtagagatagggtttcgccatattgcccaggctggtcttgaactcctggtctcaaccaattcacctgccttggcctcccaaagtgctggggttacaggtgtgagccaccatgcctggccaagttgcctggttctttacatggaatgttctttacatggaatgttccaggatcaattaaacacagataaataacaacttatgttttgtaaataaacacatctgaatggaatcttactccaatttagatagaaattgatatttttcctttcaaatgaaataaatgttttagactaggacatcccaagtgaattgaagattggtacaggagcctgaggaaggaagtttaagagagtgaaagcatgagagaagagccaagattatgtagcccagagaaggaaagaattattacctaccattactttaagggactgtgcttcctcacagtagtggaagacagatgctcattttttattcaagactgtgtaaaataaatggccttaatttatagatgtggatgctggtttatatcaatacacctcaacctgggatggctccaaatcttgactacacatgggaataacttgaggagttttacaaaaaaactgatgcctgggtcacaccctgagagattcttatttatctggtctggggtggtgtggcccaggcactgaaatttataaaattctccgggtgattctaatatgcagccaaggttaagaatgcagctgtacagctgtagatggaagaataccaaaaccaggccttctgctagtgcctgagcttctcctcattttagtttctgtgatgtgttcagacattgtttctagaatctcctgggtaatatgagttatagtcctttggatggagtaatacattaacacatccatactcacatagtttggaaggggccaggatgcaaagggaagttggaggaggaagagaaggaaatggtaaagtccaaagcatgggtgaaggggggccaatataaacccacagagcaaaaaggagatgttgggtcatcatattctattacataaattggatttacatttccttgtctttcattgctggtctttattcccacaagtctccaaatacagtcataaaattctcatgagttgttatagcaaaattgcttatcatttactatttcttaaatgaatgcataaactgtattactttggcagaaaggatgctgctgggtatcatatgtaatgtatactagtaaggtggacaggaccattaggactttaaattcctttataatctcaaaagtctgtgattctgatcttcctggtcttgcaactccagaaaaggtggtaatcactggagtaggctatttatgggcctgtgagatagtgaaacatgctattaagacaaaatgagagacttccttctctgaaatggttccatataaaagtaatatatggcttaagtatccaggggctcatgtaatctctccatgtcagtatcttttacggggaattatttaaccaaacatgtattgaacacttacgtgctacactaaaatcccagatttgtcaagttcccgtttaaaaagtgggtactaagcctaagatattagcaatacttgtatctgaaaaggcctcacatctagaaactataaagaacttctaaaaatcaatcaaaacaacatagttcttagaaaatcacaaaggaacaggtttttcagactcgaggatgtctatatggtgaaaaagcagcagtattttagagttggtctgaactgactcacaggaacctatttttaaatgtccagaaatttgctaagcaaattgttaatgcatcaattatctaaagtttaattatgtaaacttcaagttatctgaaaaacataacacatactcaaaactctcatcccttcctaagtgttttactacattctgttatttctgtttgtgaggtcatttgtttattgcatctgtatgatggaaacactgtataaaatgacatgttattcccaactccacataggctgatataacgttggtagcttaaaatcagctttagtccaggtatttatacaatggaaatggaaatcagcatacgccacaaatcaggagttgatttttttttttttttttttttttttttttttgagatggagtgtcgctctgtcgcccaggctggagtgcagtggtgcgatctcggctcactgcaacctccgcctcctggattcaagcgattctctgcctcggcctcctgagtagctgggattacagttgcccgccaccatgcctggctaatatttgcatttttagtagagatgaggtttcatcatcttggccaggctggttttgaattcctgacctcgtaatccacctgccttggcctcccaaagtgctgggattacaagcatgagccactgcgctcggcccaggaattgattttttgtttaatggtgttgactgtctacaaactgattaagaaaatgttattaaagttgtacatcatgtctgcaaccattaaattgtaagtagcacaaaaaatctgggggaaacagtcttctagactttccagatgcagcaaagaaattgccttgttccaacatacatttttattgtttcacttttgtcttacttaaccactaagtaagacatagttcctacataaaccaatcatgtaggaattacactcctttttcaattacaactttggtttgattacctttgtggtcttctgttctatcaccgtctttttttttttttttttttttgagaaggagtttaactcttgtcacccaggctggagtgcagtggtgtgacctccgctcaccataacctctgcctcccaggttcaagcgattctcctgcctcagcatcctgagtagctgggattacaggcacctgccagcacatgtggctaattttgcatttttagtagagacagggtttcaccacgttagtcaggctggtctcgaactcctgacctcaggtgatccaccctcctcagcctcccaaagtgctgggattacaggcatgagccactgcgctcagctcaccatcgcttttagataaggaaactgagccctagagagtggttggctcgcctcaggctccaggacaaatatgacttaatcaaaactatactcctgttctttcattcacataaaactacttatctaaggatgctgcagcaacactgctgtcaggccagaattcagtaagtttacagctgaggccttatctatagaccattgattttgctcaaggaaaaagttacacaaactagcaatagagtcctgaccaggcattacaaattctacactgatgtgtaaaagagggactaggcacaaagaatacatgcttagcacaatctatctttattataggaaaagcaatttaaaacatattttactgagtagtgccagaaaattaccgaaaaagaaagttaatgctttttccttctcaaaacccttctataatgtgtaggcattgtcatattagagagactcctgggaaatgcttggtcaactaaaattgttaaagagctaaaattgaacattgactcagaagcaatgtgaaatacatcttcccatttccaggatggagtgcagtggtgagatctcagctcactgcaacttctgcctcctgggttcaagcaattctcctgcctcagcctcctgagtagctaggattacaggtgcctgccaccatgcccagctaattttttaatatttttagtagagacggggtttcgccatgttggccaggctggtcttgaactcctgacctcaggtaatcgacctgccttggcctcccaaagtgctgggattacaggcgtgagccaccgcgcccggctcactgacgctcttcttaatttcttctgcctaagaaatagaaggtattctcgagggaaaaaaggcattgacaactagtacagggaaattgatgacaacataaggctgtttgaggaaaaaacgtgggatctcaaagactgttggtgggagtgtaaattgaataatctactttggagaacaatttggcagtttctattaaaatttaaaaatgctgatatcttatcagttaatcctacttctaagtatctattattaaaaaaaatacttggcatgtattcccaatgcgttttgcaagaatgttctttgtaattgtcaaaaggtggaaatctgaatgccctccagtagggaaatggctaaatgaaatatgaaataaccatactattgaatactatgcatcagctaaaaatagcaagagatctttgttgagtgaaaaaataaattgctgattgatcattaaatataacactatgtttttaagaagcctcagaaaacagtaatatatgatcctataggcataaaattatttatgatatcacacggaggtctatagaatttattgtcctctatggtagccactagccacatgatgctatttaagtttaaattaataaaattaaataaaaataaaaatttcatgtctcatttctacgagcctcatttcacgtcctaatagcaacatttgaatggtggccagtgtaatggagagtgcagatctagaagaacaaacacaactggtaacagagttacctgggggaaggttgagtttggggatggagggctacagaaactttagagttctgcagaacttttaacatttttacaatgagaatacatcatatattatctagctaatttaaaacaaatacattgttaaaatgaaaagcatgcctagccaaaggatttctttcttttttttttttccgagacagagtcttgctctgttgcccaggctggagtgcagcggtgcaatctcggctcactgcaacctccgcctcctaggtccaagagattctcatgcctcagcctcccaaatagctgggattacagcatgtgccaccatgcccagctaatttttgtattttaatagaaacggttttcattgtgttggccagtttggtctcaaattcctgacctcaggtgattggcccaacttggcctcccaaagtgctgggattacaagtgtgagccactgcactggcctagcaaaaggatttctaaaacaatgtagaattttagtagatagatcagtataaattgatttgaacaccctacctttttagcctgttaactatctaaaagcataaaaaatagtaaaacaaacggcaaaatcatttcctccttccttttctacctgtgtctagtgtctattgaacacttactatattcccagcatttaaagtacaagaatcatgaggcaactgctgtttagactgaagtgttttcaccaggggtgtatcaagaggatttctttgtcataggttgatttcccttataactgattgattaaataattactagttggcttatgcaatgtttatataattacaggatataaatggtggttattagcctaactagaatatatgcctttataatattggtgtaatattcatatgtattttactacagcttaaaataataatttcagaaagaaattcaaattgattttcataatttagcaaccatttgagctcttccaggtcagaataacttcttgggaagccccagaaagaaaagcatatacctgcttttacagttatccatagattgactataaggctaggtattgagttggcggatgcatactttcttaattctttagataataggtcaatagtgtggtagtgaatcttgatggtaagtgtccttcgcatgtttcatactgcacagtagactagactgaaagtcccaggagactgtgagtgtagcaaagaatgaatcttgtatccccagatacacaaagaccatgtcttcactggacccacagaacctagcacatggtgtgtcttattaaatgcttgtagaataattaaataaattacattcagaaaacagtctataagtcttaaagtttacctttcaattatgtaattattacttttaatttataatttattaacagacatagatattcacaacacctgcaaaagagtttatttcaacttcttttttttgtctcatctaaaaagtgtggatttaatatagcaaagtttgcttctagaatggaatcttttagagtgtatatgcgcttttgaaaaaaatggtttatgattttgttatgtaatactgttatataagttattttagaaattgcatgatttattataatatcagcagtgaatttaaacattacacaaatgcctgaatataaagaaataggatcacctgtgtccaagttaattgccttcttttgctgtattcattagccatcaatacctacataatctaaggccaagatacatatggagcaatctatggacaggcaatagcatcccatgggagctttggaaattcaggagctcgagcctcaccccagatgtactgaatcagaatctttatgttagcatggtctccaggtgatttgtaggtccatcaatgtttgaagagcacctgtctggccttcagttgcctttatacatcttcttaccaacagtaccatctagtccaatatttttctgtcctgttagtttgtccatagtctcccaacaggcttctgtccacaaagctgttatttagaggcatggccccatccctctcatagtctttgctaaggttatgtcttttacatttggagatacaccaattgcagaggagggtgaaattagcctgagagcaggaccataacaataacctgattctaatggaggctgttaccagggcagccagtacccgaactaagtcatcattctgctggaagcattccgtttggctgcagttcaacaaaaagaaaaaagaacgcactccagaaaatcaggaaggtttgcattatctatcagctatgttcaaggagatgtttgtggaaagtcgagttaagggttcctggaaacattaatctctggacatgctggaggatgcaggtggatttagagccaggcgagtctacattcacaaatcacattaacatattaaaagacggagagctcttactctgaggagccccatttagttgtattcaacccagctccatatattttttaaatcacaaaatgcttttttttttttcgtgaaacattcattaaaattaggcaaaactcatcttcggtgagacatgctttgtgaaatgtgagtggagaggttcctctgaaattgtctaaaaggtaacttaagccctgatgttttagaaaatttgacttattatgtaacagtgaatatacctatctgtgtagtttcactattttagaagtaaaacaatgctttgatttcaaatattaaattaacttaggcattgctctcccactccatctcccaagctgtgactcagatatcagaacaaattttttacctagttagggaaaaaagtttcccaagtttcagagccataaaagcatcagtaaagcacctatttattgtagcactctcttgttttccatcttcaatttcctaaacattgaatatcttgtttttcatttttcttctaaaagcatttgtggtatataataacaccgcatgaaagtggaagagactatattggctcaggatgcacttgatatttgttttccttaaatgacaaatgaaactcccaattcaacactaggataagattttttttaagttattaaaccttagttaagttatatgacttcatactgggaaagtgagttccagagaagtttaatgaacttgttgaaggtgactttgctaacttattacaaaatggggaatacaactctggtttccctaatgccttttgtaaagcatcccagataaaaatctaggtttcagaagattccttatagttaggtatgaaaaaatgttatttctgaaaatatgatttccttatgagaaaccattgtttagatatgtttaactttagaaaaaatttccaactataattaaaatctatgaattatagacatgttcagtgaaatacactgtctcatagaaaccatattcaaaaaacagaatgactggaacagatgttatgtatggggattagagggaagttatccagttatattatactaatttgagaaagattccaaaaaaatcctttcttgggggccggtcaggggtgggtatagcaaatgaaagagaaagataaggaaatgtgttccttggtgttgagttttgaatagatcactattgtgttatattcctctgaatttaggatacctgttggattttgttccttatcatgtctgttatgtggacaaagacaacaaacgtttgtttcttcttgtcaatttcattatgcacaaggattctgaaggtccacccaagatctttcgtgcactaaatgtctggtgtttgtaatacaatgaacaattttggggagtttgaaaatcttttgattatgaccttgaggattagagatcatttggtgtggatgacttcgaggaagttatttaattttttttttgtatgtcagttttctcagatttaaaatgtgggtaatagtaaccaccttgttagaatgattgtaatgatcaaaacatgtaataatgcaaagtgcttatgcttagtgcactagtgttttgcacttacatctagttatttttttctcagtaattcaataggctaagggatgatctagtacagattgagatatgggatttttgttgttgttgttgttgacaagttgcagacaaaatgtttggttattcctctcactgaaataaaacccagaaatatagggtattataatatgttaaacatttagtggctatcaaaacttattttcttctttgaagtcagagtaatatttagagagggcattctggggtttccttttagcaaaataattagaagtaatttcccttagaatttttagaatgactatattaggaggaaagggaaggttcttacctaaattgtattgcaacttttctctgaaataaaataaacatgctgtgttaaaattgctggtataggccaggcacagtggctcatacctgtaatcccagcactttggtaggccgaggtgggaggatcacttgaggtcaggagtttgagacaagtctgaccaatgtggtgaaaccctgtctctactaaaaacacgaaaattagcccggcatggtggttggtgcctgtaatcccagctactcactactcaggaggctgaggcaggagaatcacttgaacccagaaggtggaggttgcagtgagctgagatggcaccactgcactccagcctggacaacaaagccggactgtgtctcagaaaaaaaaaaaaaagaaaaaagaaaaaaaaaatgccattgtaagttgtgccctataaaatgttaacgtttctttcaagtgaaataatgacttactatttcagcagagatcactctaacatttagttttaatctaggaaaaaaaccccatataactagatttggtctttttattaaaatgaattgatcttagaagagcacatcatatgctcaaaatatagctgtcatgtaaatcaagacatatatttgttttgttcaatgaaatctagaaactcttaaaaaaactgtttactggcttttgatgtttaattgggtggaatgtataagaaatatctgatgaatttttgacttctctattgacttccaagcttatatacagccaatgaacaaacttttctaagtcttgtactctctttccatttctacacaaattcatattgaataggaaatattgaaataagatctttagaatcctcctcttgcaaattatagaacatattaaaaccaggttaaacttatttaaatctctttatatattgtttacccacctaccacgtaaatgttactgatttttccatagtaaaaagtctaaaaatccaatgcatcttacctcccctaaactacctatctctccaaacctctcattattcctccatatgtaccttctttcaagacttaattcaagccctgccttgtttttgagttattctctgtctagataaattattggtcactccttttaacccagaaggcaccaatcatttctattattaatttgattcttagtatttattttctttgttgggagttttatttatattcccttctaaagtagatattttacttttttggaaatctctgcctactagcccagtacctaataaaaggtcaatgatgatgatgatttgaaaaaccatgttctacagtgttcagatgtgcttttagataaggggatgatataactttatcatcaaactttataatgaaaaataatcatgatgaaaatttaagataaaataattttagaatatattatttggctaagtggaaaactatcatggagtttaattaaaatttcttcatattgaaagaagacaggtatatagaggagaaaaaaacataaaaacaaaaaacatctcaggaattccaccttcagctgcccttacttcaataccatgcctcagaaagaacttcatgacttggcaggtttacaggttgactcagtgtatatgctgagaatagccaagggcaaaatttagtgttaactagatcaagaactcaggggacccaggtgtctactgttttccatagaaataaccataaacaattttaaatactagatctgctttccttttgggtttgtataatgtagagtcaaaatagaggctctggcacctcatagacacagatttaaatcccatttatgccattggtaaactatatgacctctggcaagttatttaacctccttatgccctcatctctaaaattgtagtacgaaagcaacaccctaagtatgattgcaaggattaagggaaataaaatgcaaagttcctggtacataattgatatctactaagtgtgaatttctctaagttcctcatatcacataatggtagatttttatttactgggtggttattctgtaccaggcactctcctaaacacttatatcatggggattaacacatttaatccttgtagcattcttttgcaatagctactatcatcatcatcctcattattatcgtcctatttcacagatctggaactgagccactgaaaagtaaagtaacactaactagtaactagtacttctggggttcaaaataaacttttcatttctaaaattaacccataccttcttatccagtagacaacataacctctcccactatcaggtcatttccatggcctatatcctgtggacaatttgaaagcgatttccttttaacccttgtttatctaattagaacatagtttggagaaacatacaatgttttccatagctgagtataaatcattttcttccatccttttgaattagccacatcattgctctctttccattgtgggaaatctagccttgcttgtttgtacctagacaaaagcacactttttgtgtcagaacctgtgaaaattttatcttccttgttaccacctataaatgattaatgagacaaaacattttcaaggattccaaataatctaaaaaatcccacaaattttgaaaatccacaaagaggtatctaggaaaactttcatgaagttaagagatgttatctgctgttctaggcgtgggtgactttatcaaaacatttcgcccactttcaaatttccacttgttaaaacctgaggccttatttggctgtcacttactgtacagtgtttttcagacaagttcctggcagctaattttaaagagattttgtgaaaaacacaagctgtggagtgctcctgttggaagagcaccctctgaccctctgccttaacataagaaaaaattgccagtctgtccaaacctcacccacctttggttatcttcagaatcttacaatttgtgtttcctaaggcagcaattttcaagcatgactttgaaacactgcaggctttttcaagttatttcaaggactggccaagaattctcaaaacaaaattaattttgtatttttaaaaagcagtatgcatatcatgtatcatttggcagatttaggaggttaacagtaagcattaggaaattgaatcaataataataatgggatatggggacctgtaaagaaactctcaatcctgcttcattacttttaatggcaaaaactgtaattacttttgcaccaaccaaatacactgaaatcctttaacatacaccaaagcaatgggagatctgcagaatgcttttgtccatgtttaaccataatgatcaatgcattttgaatagaatattgttatatctactatttagcttaattgtgatcattaacaaagtgcccagactctctgaacattctacatggcatactatttgtgagaagatcagcatgtaaatagtttactctttgtaagctcttctacaaggtggctaaaagcaagaactagaacccagagtcccttgcattcaatgaatttccctattattgcccatatcattctttcttttctttctttctttctttctttctttctttctttctttctttctttctttctttctttctttctttctttcttctctctctctctctctctctctttctttctttctttctttctttctttctttctttctttctttctttttctttttctttctttccttctttttgagatggagtctcgctctgtcgcccatatcatttttagtataatctcttcctttacttggtcactaagaatcacttttctctacttagagccagacatttaaatatctccagcctccaagatctcgtctgggtacttgggctgcactttttcatgtcaatcattttgcacttgtcatctatcctattaggctataagctccccaagggcagatatagagacatagtatcaagctaacctttttatttatttatttatttatttatttatttattttgaggctgggtctcgctctgtcatgcagtctggagtgcagtggcatgatcatggctcaatgctgcctcaacctcccaggctcaagcaatcctcccatctcagcctcctgagtagcctgggactgcagacgcatgccaccacactcagctattttttaatgttttatagagacggggtcttgctatgttacccaggctagtcttgaattcctgagctcaagtgatcttcctgcattggcctcccaaagtgatgagattacaggtgtgagccaccacacctggccaagctaatctttaaatatcctagagcacccattatagtgtctggcaaaaaataaatgcccataaatgtttgttgaatggaactgagtcttcagaaactagagattttttctaaaatatttttttttgccatttcagtttaatacatattagtttttctcacttatcctatcatctgaattttttatttctttgaacctgaacaggctttgtgtctacagactgctgagcctttaattttgttgtcgtttgttttgttttgttttgcacaaaactaaaaacatgtacaaatacatttttaattgcatttgttcattctagtttttactcgtaaagtgcacttctttcttttctttctttccattaatttctgaaccttcccttcttaaactttacccagagttttctcatcatatacgcatttcattttcattgtacttttctgcatctgactatttcattttccagttgttctggtatgtttttctaagtattgtccaatcctttccattaagttacaagctccttgagggcaagcattgcacacctgttttgcacaacttctaaggccgttcagtccctcagcccactgtatagaaatatagtatatatatagacaatacacacacacatgcacacacataccttgccacttaatgatgtaaagtgacaaaaacttttatattggtaaaaattatgagaataagaataatcatatcctgattcttcaaattcaaatatttgtctaacattttttgatgaagtcatagcacttatgtgtcattgaattgttgtgggcatgctaacaggaaagatggaccaagtggttgaccctgtccttctgtgaatagaacctcagagtacacttttctgtaaacatttaaaagacaaggaattggaacttaaaatggagcaaccaggggggcagggaaacagaataaacttttaaaattgacctaatagtaatcataggaaacaaaaagaatcattccagtctccatttttttttttctggatgcattttgtagctccctaagttattgggtttttaagaaacataaaatattcctagatcgttagagatgtgatttgatttcaatcccacatggtctgtagcatcactaagctactgggaacttccctatgcaaaggtttgagtttctttccaatgctgtttaatgtctgcacttctagtgtccacataaatgagatttaacaggctttacttcatactttcttgttacaacatttttactttttttccaattgcaaaattatttcttttaagctctctgaataagtttgttgaagctctattcatcacacataaaaatcttacattaaaaggcaataaaggaaatcacgaaaagctagatgtattccaccctcttatagttgaatacataaaattgtatatatcacaaatagtaattgaaactactcttatgaaaactatctgtccttctggaggggcattagtttaaatgcaaagagaaaacatatcatttgtgagtctaaatagtgttgttagttctttgaaagggccctaattaataaggttgtagaacacaactgcaacctgtaaagcgttccatgtgtagtattttgaaaccttttgtttgtttgggttctaactagagacagagggagaaaaagtcaatttcattctcatgggatttgtcttatgtggttcatcagattgagtttagtaagcagggaagtatttctccttgtgtagctagtgcttgtttattcttcccttattaaaaaaaaaagagagaaaaaaacaaaggattggcatttttcttttatgaacgtggactgtagggagataaatagccctgcgggagaggaaggtcaagttcaaagtttttctttcctttggattcaggaataagcaaatggaaagactagccaaacaacccagcagcaggcatctgatggttaagccctccccccaggactttttatgtacataagcagcagaagtcactcgcgcagctgcggcgcattagttccaatagtttaacaggctgctttgtagcacggacaaagccgtgcgagcgcggtgctttccctccttgttcatttgctatgcgagcttgtcagtgatctttggcaggggcttgggagaggaggggtgacgtttaatacgcttccgcggaggagtgcgctcgcctcctctgcacccagccccaggctctacagagagactgaggcaggcgactgaatgcactaacagcagcaggctcagacctgcttccctggacatttccgggaccgtgagcgagggaaccacgttgccctggattcttgccagctgtacaaagttgaccaggaaaatggctcagcagacaagcccggacactttaacagtacctgaagtggataatccgcattgtccaaacccgtggctgaacgaagaccttgtgaaatccttgcgagaaaacctgttgcagcatgagaagtccaagacagcgaggaaatcggtttctcccaagctctctccagtgatctctccgagaaattcccccaggcttctgcgcagaatgcttctcagcagcaacatccccaaacagcggcgtttcacggtggcacatacatggtaaggtttgcgcagacctcgcagaaatggtggccgtttcccttcagggagtcctgctctcgcgcctttaattttgggggtagggagggaggaccatcatcattcctcaccggggatttatggccaagtgatctcccttaaccataaatcccacaaatgtccaagtcagggcaagaatcctggagactggtactaggagtggttgaggtgggtggttctcaaagttcaattcctattgcaagttcctacaagaaaattggatgccagatgtcaaataagaatgcagttttattcccatacgtacgtagtggcgtttctttgattccttaaaccaatttccctgccagcttccccaacagctgaggaaagaaaggaccagaaatgaggggaggaaaatcatagtttgctctgttttctgcatgatccccacttggacagagacacatacagtgtgtgtgtaatggtggtgtgtcttcataaagcccttcctcactcctgactttgatatacagtattcataatcttaaacatgcctttccaaaggaaagaagaaagggattaggaattctacgcagaaagttgcaggctggtacttggtagtattgttgtgttctttgaatttggattgttagaacattttgccaatctttttattttctttgtgaatatttttatcttctttataatgggtgaatttgtttcatgcatatgcttccatgtatttttctggaggattcctcatcttttcctgctcttggaaaaaaaaaaaagaagaaaaacccaaatattaaaacagaccatcatgtgagcttatttggagtatttggagtttctgcctgagtagaggccattccaaactctgatcagtgagtccaagtactagggtctatgttacacacttagataatttcaggtagtagtaggttctatacattacatctacattttgataagatgagtataaattatgataaagaaaacataacaaaaaagaatgagtgtgttagttgagaaactgtatgactaaataattttttacagttttgccataactaactaaacagtatgtacgttagcaatgggagggaaaaaaaaagcagaaacaaggcttttaggaggaaagcagcaaaaagtaaaaggaattaaaacctaaaccagtgacaagaccgtgctcaggaatgcattgatgttatagatgaaagtcaatgacaaaggaaataaaagccatgtcacacccaaagacatgaccaacctcaaaaatttggttttaagtagctagatctctgactgggaaagtgttattgtccccaggattttaacacctagatggcatttctgagtttggtagatgtaatggccataagaggagtgagacaaacattgactttttctgtcttaaagcagttattgggaaatgatggcttctctttgaggaagattttctttttggaaaaaattgtgagcaacaaacagtgaataaaagaaaggcatgaataaacactgggagatgcactgaaggagaaggttggctcaaggccaggcatcgggtgccagagcaggagagctggcatgagttcctacggagccaggaccagaatttccgtgtccagtgtcccttttggttgcgctgctttatcactgcagttcctaaattgcacccattgctgaatgagtggccctcaactcagctgtttgatttcagtctgagtggagcaacctagagttcagctggaggttatctgaactatttagacatgtcgggatgtaaggaaggcaggaaatcccatgaaaataggctttcttctgacatttctggcacttccttttctggtgctgtttggaaaaacttcatgagcacaatttctatcaatatttcattttagtgtatcaggtcacagcccagtaagaaaagcataaagagagcaatggaaaccagaaataaaaatcatggtatcgattttcagtaactcagaaggaagcagtttcccctatggactaaaactatcaggcaagggagttggaaagagtatctcaagttttccatattggttgaatgagccccaagacgttcataatatccacaggcatcttttgacaaaaatctcatttgtgctttcacagtttgtgctaagcactatggagaattttgaaaatatgtttcaaattgttctgacataaatataaatatatttgtatctaatttgttgctagtacagtgttctgcctcacagtttcctgctcctggtattcccctccattcgctatgcatacacttaatacctactgagtctaacatgtttattctgtacctaattattacaaagttgagcaagaaccatttgttggtttccaataatttataccatggtagaataaatcaataatattggaagacatctgttttagctaagataatcttgctgttctacaaaatagtctccaaatctcattggattgacacagtgaatttttatttcttgcttctgctttttgtggggaggcagcctgccctagccactgggtgcctcagggacctggaattctaccatcctgtggttccattatttgcaacatgtgattcccaaggttgccaggctcagatgaatcaggagaaagaccatgaaagaggatggtatgtgtgaacttttatgagacaggccgggaagtgcacatgtcacttatactcgttttcttctggctggaactcagttctatggccacatctaactgcaaaggaggctgggaaacatagctctgttccaaggcataaagtaaagtgctggtggctaatctatcttggttatatagtatgttaagggctatctgatttaccctctatgccatggttgaattcttagaataacatctgtaataacatatgccattgttgaattcttagaataacatctgtaataacaagtccttgaacctctcgtcaaacctccttgatgaagattatacagaagcacttctgttgtttgatagggctgttgattggaaagaccttgcttctaaacagtagaagtctccttccctgcaactatcatccatggatccaagatctgctttgggaatcctacaacttgaatttttgctcccttccattatgaagccctaaggcaagtggcttggagtaacccaccagagaaccagggccctattcattcattttggtatacccatgcttggcatgatggctggtcaatggtggaagcttaataaatgtctgctaaacaaattcattaatcaatattttagtgttctcatgctcttaaaaaagacttctcttgggctaagcatggtggctcatgcctataatcctagcactttgggaggctgaggagggcggagtccctgagctcaggagtttgagaccagcctgggcaacatggcgaaacaccgtctctactaaaaatacaaaaaattagccaggcatggtgatgtgtgcctgtaatcccagctccacaggaggctgaggcacgagaatcacttgaactcaggaggcggaggttgcagtgagccatgattgtgccactgcactccagcctgggtgacagagcaagactctgtcaccaaaaaaaaaaaaaaaaaaaaagggacttctcttttcttaagtaaacatcctgttatttcatttctatatgctatatttaccaggtagtttttatctagacttctcttgggttttcatgatccatttaaagaatagctactgaattgacagcatactctaggtgctatgtcactcagcaccaaagcagttagaaaagagactaaacttaaattcttactttgcatttagtaattgtgtgactttggtcaagttacttaacgtgtgcttcagtttccccgttagtcagttttctgggaatagtatctattgggggttgtggtttaattaagtacaattatgtataaattaagtggtttcacagggctggacccttagtgggtgtcattataagctagtattttttttattatgtactctgtgcccattattccagccttggtctgcatgaacctttaggatcatgtttaaatttctagatgattactctgtcagtcatttgtggatgaattagagtgaagagacaagagttgaaagaaacgagtgtatgtcagttttattactgtaggaaaggagaaggcagaaatgagagatactactgaggcagaactgtggggtttggtgtctcttctctgcccactgcaaaaatacatctttcaaattcctggttttcctaaaaggttcctccagttctcccaactggaagtaatccgttccttccttcaaggaacagatttctattgcgcctcttgtctctgatactctcaatgcttattagtaatagttttatcactagctagtatgtgttgagcactggttttggtctggcaccatctgttaggattagaattctcttgtgtctctgcttttcactaatctgtttgactgcttttactaaacatgcaatgccttgtagttctagtgattatagacatgattcagatttcatctggtaggggattccctctatcatcagcaggaactacaaagtcaatggaatctctggtgaagaaaacttaacttccagtactagtttatttcaggaaaattgaaatcaggaagttcttcacattcttcaggcttttctcgtcattgaattttaagcacagttttggggtgtaaggcctaaataagttttagaagaacaaggtagaaatgctggttttcagtctttgggaacttaaaagttgctgtttagtcatatttaagtcataaaacctgttatcttcacatattcttttaaaaagtaatttagcattataatcacttaagttataattttttcatatttttataatacacatctatatatccacgactcagatttttttttattttttattttattattattatactttaagttttagggtacatgtgcacaatgtgcaggttagttacatatgtatacatgtgccatgctggtgtgctgcacccattaactcgtcatttagcattaggtatatctcctaaagctatccctacccgctcccctgaccccagactcagatttttaaaatgccaaaattttgtcattgtttgcatcagttcttttatttttttaagaataaaatgttacagataatgtctaaagctgtcacccatcctattcttcttccttcgcagaggatcctgaaatcagtgtgttcttccttgaatgtcattgtcttttaacttcatatgtatgtgtcctgtttgtgtgtttaccattttatatatagagatggtacatgtatatatatctccataatatgccatactataaaatgagaaagagcaagctatatatatatatatatatatatatatatatatatatatccttaagcagtttgctcttttttagtacatagtataggaatagagttgtgaatatatatataaaatatgtgtgtgtatatatacatatatatgcatatatgtacctatatacatatattatatatacctatatgaacctatatacatatatacacatatatgaacctatatacacatatacacataygtacctatatacacatatacacatatgtgtacccatatacacatatacacatatgtacctatatacacatatacacatatgtgtacccatatacacatatacacatatgtgtacccatatacacatatacacatatgtgtacccatatacacatatacacatatgtgtacccatatacacatatacacatatgtgtacccatatacacatatacacatatgtgtacccatatacacatatacacatatgtgtacccatatacacatatacacatgtgtacccatatacacatatacacatgtgtacccatatacacatatacacatgtgtacccatatacacatatatgcatatgtgtacccatatacgcatatgtgtacccatatacgcatatgtgtacccatatacgcatatgtgtacccatatacacatatacgcatatgtgtacccatatacacatatacgcatatgtgtacccatatacacatatacgcatatgtgtacccatatacatatatatacctgtgtacctatatatacacacacacacatatatatatctatatacctacatatatatacacacatatatatatacctggatcattttttaaaatgctcaacagtacacacatgtaacagcatttcagtcaatggtggactgcatatttgatggtggtcccataatattataacggaccagaaaaattccaatcacctagtgaagtcatagcacaatgcattaattactcttgtgtttgtgggcatgctggtgtaaacaaacctaccatgctgtcagtcccataaacatatagcatatatagttatatattatacttaataataactatgttgctggtttatgtatttatgtattttaccattgttttaaagagtactcctcctacttatatacaaaagttaactataaaacagcctcaggtaggtccctcaggaggtatctagaagagggcattgttctcataggagatgacagctccatgcatgttattgccccagaagagcttccagtgggacaagatatggaggaggaagataatgatactgatgatcctgtccttgtgtaagcctaggctaatgtgtgtttgtgtcttagtttctaacaaaaatatttagaaagtaaaaacaaattaaaaataaaagcttatagaataaagatatagagaaaatatttttgtgcagctgtataatgttagtgtttcaagttaagtgttattacaaaagagccaaaaaattaaaagaaaattaagagttgtataaagtaaaaagttacagtaaccaaaattaacttatatcaaagaaataaaaatatttataaattaagtgtagcctaagtgtacagtgtttataaagtctatagtagtgtgtggaaatgtcccaggccttcacattgactcaccactcactcactgagtcacccagagcaactttcagtcctgtaagctgcattcgtggtcagtgccccatacaggtatatcattttttatcttttatactgtatttttaactgtaccttttctatgtttagatatacaaatacttaaccattgtgttatgattgcccacaatagtcagtagaataacatgctgtacaggtttgtaggctaggagcaataggctataccatctaggtttgtgtaagtacactctaacatgtctgcacaatgatgaaattgcctaatgacacatttctcagaacttagaataagcaatgcacaactctgtgtcaatttgcctctaaaaacccagctgtttatactcttaaaatattgttactatagctgtcagtatcacactccaatctaagtgaatgtcacaatgaaaaacattgagtcattttactataacggaaatgaagatgtaatttcctgaatttaacagtcaatttaggctacatagtgaaatattttcaagctactttgaaaacattaaccattaaaaactaatattcatgggtagcattcactaagatgcatcaggtttgttatttatgatatatctctcaaaaacatttttaattccaaatataattaaaaccaaatacagttttctaatataagtaatttcatggggattatattcctgattaaggactagatgaaaacattgtcaatttatactgtgctcgatgcactgaatggaggaaaatgttccagcgtgtatataagcgaaattaggtagtaggatatctttaggaatcatggtgactaggtaatactcaactgtataatttttataattcttgtatacacatatgtatttttaattaaaacatatccaacagtagaagaagtacttagtaacaatcttaacaacaaaataatttctttaggtggactttcaaaaggccttttaggagacttttaataaatcttaaatgtgtttaggaagctaaataagtgattttggccatattttttgtttactataaatttctctttatcaggcattggcattagatgtaaagttgctcatatttaaaagtaaacatttgctttctgagtcattatttcttcagcaactgtagttgtttttatggttgttaagagaaatataaatttgcaagtcatagaaggggaaagaaaccatttgtcacctataaaagagaaatacagccacttagagtttgtagagtaaaaatacacatatacacacacaaacaactgagtagattttcaaagccattatttagtgatttctctttgaggtctctttctccctcgttccatctctcttacttctgccctgcttagctttaaggttatcttttctctgtctcttatggtaataatacccggagaagagcattgctgccagtctcctgggaactaggaacccagaggagggctgtaggcaaagtgtaataccagaaggtggggagcaagtttctgggggaaatcatctgagaagcacaccaggaagtgctgctggaatgtttggggaagaccagtcagccctaaccttcagccatgtctgtggcataactggctgttgccctctgtggaaatcatgggaggtggaggcgctgcaagttgagggtgtctgtaccatttgaaaggcatagttggctttccacgaaatcaaaagacctgaggaagattttccttttaaagaacatgccgattggcttgtcatgtttaaggaattacagggattacattatgacaattggcattgagaaaaaagtgaagaaaaccttggataaccttgcagcttattattcacgtgtgcttcccatgaccattgacatttatcttaaagagaaaagatgtgaagcctgttcgtacgagctgaagccgttgctactgatggtaaaatctcttcttaagaagacatggtctttcttgcaaacttggcagaaatgttgataagaagaaaataaaaacttgaatcttaaagttcattaaaataatgaaaatcatggctttgattttttaaaaaatattctttgtgtaaatttctttataattgaaaagctcctatgtattcagataactaaaggagtttcagcactttttttttcttagatagaaagctaccaaatttgttcttcaagtagcactttcaggaagaagctttactatctctaatgtagcaaaataatgtcttttttttaatggttttgctttttaaaaaatcatgtttttaaagctgcgattcattcagtatattgaaatcacatatttccaggtcttctggtcatttgatacttgaccttagttattcaacctttttgacttggagactctattaataagtcatatggttataaaggcatttggcatttacaagtaaaaagtaatgactaattaaatttacaaagtgataacaaactacagtctatttaagattagcaattagaaacaagttccaacttgctgctgtaagaaagtaaggtagatgctacatgggtaaaaacaggaaacagaattatttaataattctgtgactcataaataggattcagggccttcagaatgaaggtattggtggtattcacgttaggccaccatctgaaaggcataattttaggtaacagatagggaaatgtatagatcactgtaaagattctaatttaaaattctcttttactagacttcaattttataccatcttaacacatcagtctcttctactgtaaataagcaaaacagaaaaatcattttatgtgcagttttaaggacataaatactctccaagtatttcagatgaggcacttattctcaaaaggagatcttgaaaagttgatctgagaagaaattacatgatttcattttggaataaaaacacttaggttcataataatatagctttataaccttagattaattataacatagacgtcaatgatttagctcctgccatgtgtcaggtactttgtgtacattaaccccttaaaacaaccaaggttggatgtaagtattgttaaccgtactttacatatgcagctgctgaggcccagaaaaagttcttacataaccaagatctttcagctaaacagctatgaaaccaatagcattaaaacttgaacccaagtcttcctaactctccatcgtgtgttctttctttcagcattaccttcctttgggctaagaatcacattcacatttgttaccctaccctgcatgtgtattgaagttataacaatgaatattcaaagattttacaaaatagtagttaacagaaaggtagagacagagcccttttttggtgtggaatctcagtttattagtttacacatgtggcttgtatagaagttgacatccttataaaatattcttataaaaatatgtgtgtgtaggagaaatatatgtccttggtgaaaaggggtcaatggagaacatttgattcagggttgtttttacataagaggtgtaaaaacaaagccagccagagaataattttatagtcaatcattcagggaaagaaaaaagtcttgagctctaaggagaaagatcaagtcagaaatctgttaaggtttgactctggaagagccagctgggaatgatggccggctagttcaagtcactaagcaacagaacagcaaactgcttggtaacaagatctggcctgactcacaggctctctttgagtgacctaggtggccagatagaggaggaccaagacccatcttacctcaaaacaatatccttccatttccactttgccagccttcatgccaaattccacattatagaatagtctctttgacttgagatatttccttttagaatggaaatatctctgggactagaagctaatattgttgtctttcttctcagaaatagtgtttcagagattgttttctgtgattcaatatattatttaaaaagtgtaagctttaataagagcaaacaaagtggaaacatttgagttggtggtctgacttttggttttcgtaagcaaatgtatacagggccaaaactacctaccttcattgggtgcaatctttctttccttgggctctcagactgaatgtgttgacatttatttgtcattttctatgttatgctgtcttctagttcatgtttgtatttcaagtatgtagctggactgtaagttcctaaaaagtaagaaccggccgggtgcggtagttcatgcctgtaatcccagcactttgggaggctgaggcacgtggatcacttgaggtcaggagttttagaccagcctgttcaacatggtgaaacctcgtctctactaaaaatataaaaattagctgggcatggtggtgcatgcctgtaatccgagctactcgggaggctgaggcaggagaatcgctggaacctaggaggcggaggttgctttgagccgagattgcaccattgcacaacagaggagataccatttcaaaaaaaaaaaaaaaaaagtaagaacctccacattcatcaatcattgtatccactgtgaaggtacaagtgccacctgtataatatacattcaataaatagttgttttttgatcgattgagaaacataccttctgttgctgtgtcttttatgctgaacacccagggggatccatacccttccagactagaagtcctggtgatgttggttttgattgccatagtggaaaaaaactttgaactcaatgattaaccatttgtgtggactttgtcaccatgactcagtgtgtgtctctgtgtgtgtgtgtgtgtgtgtgtgtgtatgttttgggtttacatgcacatagattggtatagttggctttggtgtatatgaatgattctgtatcttattattctgtcacaataatttgtcaaatacatgcattttaatatttagcttatactttgaaaattatttatgcctgttatatttctgaaaaaaatctgtgtaaatgtatctatgattcttgggaaattactgaataactagcttgttaaattctgatgactaatccttatcttttagaattcataacagttaaattatatatcaagacctaagcttacaaaagaaatgtcaagattttgagaaatttgcaaaaaaaaacccttcatagtttcattttcagtgttttaatttggagaaattttaactggcagaaattaagtaccatttttccaaagtagatcttcagaagaactaaaataatagaaaacctttttgaaggggtttagcatagaaatattattttaatataaatatttttatacagttaaatattatatatatcatttttaaattgcagtaatttgagaccaatttttccccattacccttttgagataaccctctgattaaattagctattattaaaataaagtggcttcctcttcatgttattagtagggtaccagttttttggtttttttttttcatacatggctaatttcacatttataaatggtgaagtgtgtattgttgaccttttgaagcaagcaactttctgacttaagattacttggattatcattcctgcttgtttgccttctttaggttaatagtatttgttttactttgctttattttgtgcagtgtgattttttttatgaccttctattgagtgattgccaaatagaacagcgtatgatttatggatactaataactaaaatatatatgaattgcaggctgataatgcacaaggctgatttctacagttctcctctgaatagaaccaggcttcctttaataaagccttcttactaataagaatagcagtttcactaacacattgatcattcttgaatcaccttcacaattttaggtgcaactgtgggccatttatactgtttacatttaatatttctagtagacttacatttttatttaaaaggccatatgtttaaaaataaagctttgtatattactgtaatttggaactagcgtcatttattatgcatagaagataattgaaaaaatatacaataaacaaggcaaaatagattcaagtttagctagataaccatgaccttccaaagactctgagcctgaggtctgttctctgtttaaaatggcatttagcaaataatatagacatatgaaagaccacaattaagtctttcttcttaaggtaataagaattactgaaagggatttggaaaggaaataagcttctccttatttaattcaacattttaaaattcaataagccacatcagctatgccaaacaccatctttgtacaacctcaaaccatctaatataccaacctgaaccactgatacttccaccataggaagagggacatttgttcttgcagaagttcttctgttctcaatcccttagttgcaggtaaacacactgaacttggattgggtgatgctaatccctaagcagaaagtatgttggtactctgttttcccacactgtaattattaagttcttacctggtagctgcacagatgcaaaaaaaaaaaaaaaaaaaaaaaaaaaaatgttctgtggaaaattctgtacctgccaatggtagattccaagttttacttccaaagagtgtaaacatgggtgttttaaaaagtatgtctcaatgcaaataaatgagagctaagtaaggaaccacatttttctaccctgtaatcttttttactctgtaaactaattactttccatgctagaatgctcacacagcactggctacgtaatttgtagggcccaggtaaagtgaaaatacagggcccgttacgcaaataaatattacaaatttcatgatggcaacagcactgcattcaatccagcacaaggcccttctgagagtaggatcctgtataacttcataggtcacacctgtgaagccagccctgcacccacaataggtctgatgtgatgcccagaaagtcgactttgtaagccctacaggtgatgtggaagccatacgttgagaaactgtcttaaagggacatctttttagacagtctcactctgttgcccaggctggagtgcagtggcacgatctcagctcactgcaacctctgcctcctgggttcaagcaattctcctgcctcagcctcctgagtagctaggattacaggcatgcaacaccatacccgcctaatttttatatttttggtagagagggggtttcaccatgtttgccaggctggtctcgaactcctgacctcaagagatctgcctgtctcagcctcccaaagtactgggattacaggcatgagccactgtacctggccttaaaagaacatctttattcataagctcctcattttacactgttgatagaaacttcagaagacaatgatatgcgttgaagtaaaaaaacagaagttccaagaaaagtcagagttggaccagctataaattaaagagaaacattatcttacattcatcttgagagttttctttgcaaatgaacacgtacatacacaaacaaacttaaagcagcattgcctttgcatttaaagtcacttactgatatgcacagtattagtcatggcaaaatattattagcatttgaaattgatgctcatccctctttgttgatactgtctcatttactggattaactttattcatatgagatctcccttttcttttcattgtctctgtttccagcaccttaattgaaagtacccccggttacataattattcctttgaccttattcagtatgttccctgcaccacaagtgtctctcctctgttcaattccaactgtcagctcttttaataaaccctactcttaaacctcatttcccaggctcaagttccatatgcctcctctggacatttccacgtggaagatccactcttaatttatatttaacacgcacaaaaccaagcttactgtgcccccctttttgatttttctacttctgtttatctggccattatcttcccaaaaaaccagaaaaaatcatatttgacttctgccttgccctccttctgcctaggcctatggattatttcacctattatctcttgctgttctgttccctcccaataccaccaggtattttaatacttagatttgtgtttgatctatttcaataacattctaacttgtctttgtgccactagctccttcccactaaggatgtcctacttatactgtctcattaattaccctacagttctgctttgattgtccactatctatagcagaggtgaacaaaaggaccagaaaataaatattttaggctttgcggaccctatggtctctggggcaactattcaaccctaccacggtagtgcaaaagaagcccagatatacaaatggacattagcatgttccaataaaactgtatttgcaaaaacaaataggctgaatttcgcccactggccgtaatttgccgatccctgccctgtaggataaagttcacacctttaacatggcatctaagcatctgtcatcagttctgcacctatctctgcaaccctatgtgttattgtgtcctatggatacttcacatccttcgttttgaagccgaatctagagcagggttgctcaacctcagcagaactgatgactgggccagaatgatgctttgtggtgggggctctcctgtgcattgtaggaggttaagaacatccctggccactgcccactagatgacattaatttccaccatgaggtgaaaattcaaaatgtctccaagcactgccagttttcccttgtaggggacgagggattgttttcagttaagaactactgccctagggagtaaattttgtgaaggggagaaccagttctacctcattcacaggtgtatccctagcacctagcacagtcttgtgatatacaaagaggttcaggaatctattgcatagtccaactctgctactcactgtgggatcctagggttatttaaattccacaaatcacaattaagttcatctgtaagtggaactattactaattcatacatgtttcataaaattatttagaagttcaaatgatatatttaacaaaaagacctcttgaaagacagtagtactttcaaataaaaggtaaacatacaattgatagaacactgaaggtgatctgagcctattgaaatctagaagcttaatttgactcacatactctgtctacactgtacaaattactatatgggatgttattggggcattgtctttgttctcaaggattatgacctaacaggtgttagaatatgattactcaaccataaaacaatagttgccataactaagcataaagagtggttggaatttatgggagggagacattgtatctggtactaggaatcacttaagacctcatgagtgagatgaaatagtcacagagaagtcccaggcaccctactgagcattgtcttagatgatctcattgaatattcactgcaacttgattaggtttaggttttattatcacatttcacaaagagagaggggcctaggaaggaatttgatatgaatgtgaagcatgggagatttcagcagggagagaactgcagtgaagtgtggaaggaggggaagtgacaggaggtgttttctcaccaagggaatagtgtgaacaaatatggggattacatggggtttaggtgagtttgagtgcctctagggaaggtaggttggaatcagattttgaaggattgctaacatctctctctctcttgctctcgcttgctcgctcgctcgctctcacatcacacacacacacacacacacacacacacacacacacacaccagggatttatatgtataaaagaaacatgatgatgttatctttcctaacagcttcactccacataacaggaagtgacattttgagttcttaccccatgctaagcttgctaagccacaagtatgtgcactgaacactttcaatagttggactttgagactcagttcaattagaccaatctataccatctttcagctagctactgctcttctacttttcccaagataatccttctgaaatagatacacaatgctgttttcattcaaatcagatgtgttaattctactagtggcacttgtgttctgatgcatagaacagaggcattatttacgtgaggactgtgccttccttcttactgaattgcaaaagtatacaattcttagaacacatctagcagttctgaggggctggacacagaaaaccatcttactctgaaggtaattttctctattttatcactagctcaccaaggtgagagtcaggagtgaaatatcctattttcttttcatccattcaaaaaatagtttgagtgtttcctgtgtacctattgttcttctggagatagagaactgaatgaaatagacagtcttccatacattggggcatactttttttttttttttttttttttgagacagggtcttactcttttgtccaggccgcctagagtaaagtggcatgatcactgctcacctaagccttgacctcttgggctctgggttcaagaggcctcccacctcaacctctcaggtagctgggactacaggcacatgctaccaggcctagataactttttattttttgtagggatgggggtctcactatgttgcccaggctggtctcaaacttctgggctcaagccattctccagcctcggccttccaaagtgctgggattataggcatgagccactgcatcaggctaaagagcacatattctaataaaggagaagacaacacacaaataaatattccagtgggtcagagaaagacaagtacagtatagaagaataagtcagggtaaggagttacagagttgtatgtaagacatttcagcagagatctgaaagagatgactgaacgagctatatgattatccagcagaagtacatttcattgtgatttcaagtacgccaaatgtggttggcgtatttgagggaggggggaagttatagaaaatgaggtaggagccacagaaaggcatcagatcacatagtgctttgagcctgtagtaaagacttgggtcattccttggtgatgactgtgatgtattgaagcaaaaagtgttagtagtaggaatgtctgtgttaggaagggacacagtctatcataagttttggaagaatcatcccggctcctgtgtagaaagtaaagatgtggggaaaatggaagcagagaccagttaaactattgaagtaacccaggtaacatgtattggcagtgtggactagagaaatagaggtaaaagtagttaaaaaaaaaaaaaaaaaaaaggtcataattctgtctaccatttgaagacacagccaacagaatttgtggatgcattggatgtgaagagtgagaaagaagaatcaagaataactcttaagtttgtggacttagcaacaggtagaatgtagttgtcatttgtcaagctgaggaagattgtggaaggagcatttttaggggaggtggatcaggagtttagttttaaaaaatttattttggggatgcctcttagatttctgcatggaggtttcacttagataactgaatgtatgagtctgaagtttggagcacagattagcacttgagatgaacacttgagagttattaaaatgtaggtggtattaaaagtgataagtctgaatgaatcacccagggagcaagtatatatagagaaaagacctgagacagttggggcactttaaaatctagaaatcaggaaaatgaggaaaactcagcagagaggccagtgaggttgaagaaaaattgagagtgatatctggaggccaaatgaacaaactgtttcaggagaaataagtggctgggcatggtggctcacggctgtaatcccagcactttgggcggatcccctgaggtcaggagtttgagaccagcctggccaacatggcaaaacctcatctcaaataaaattacaaaaatcagccaggcgtggtggcaggcacctgtgatcccagctactggggagtctgaggcaggagaatcatcacttgaacccaggaggcagaggttgcaatgaactgagatcatgccactgcactccagcctgggtgacagagcaagactctgtctcaaaaacaaagaaacaacaacaacagaaaagtgataaactgtggcagatgctgctcataggtcaactaaaataagaactgagaattgatcattgcattggcaacatgcagccaattggtggcatacaacacaagtcgatcagtagagtagtgatgatacaggactgactagagtggaatataacaaatttccccaatgcttaaaccaacaagcatttattattgcatacagtttctgagaaatcagggagcagcttagctggctggttctgactaaagttcctagaagaaattgcactcaagttgtcagtgaaggctatagtcatctgaagctgtatctgggactggaagatcagttttctaagatggtgctgtccgcaggcagccttgctttacactggctgttggcagaagacttcagttcctcactgtttgtgcttctccaaagggctgggtgttcttttttttgttgttgttttaatactttaagttctagggaacatgtgcacagcgtgcaggtttgttacatatgtatacatgtgccatgttggtgtgctgcacccattattaactcgtcatttacattaggtatatctcctaatgctatccctctcccctccccccaccccacaataggccccggtgtgtgatgtcccccttcctgtgtccaagtgttctcattgttcaattcccacctacaagtgagaacatgtgatatttggttttttgtccttgcgatagtttgctgagaatgatggtttccagcttcatccatgtccctacaaagcacgtgaactcatccttttttatggctgcatagtatttcatggtgtatatgtgccacattttcttaatccagtctatcattgttggacatttgggttggttccaagtctttgctattgtgaatagtgctgcaataaacatacatgtgcatgtgtctttatagcagcatgatttataatcctttgggtatgtacccagtaatgggatggctgggtgttcctacctcaggcacaggagtcagtgattcaagagagtgcaaagtagaagccacaacgacttttatgacccagacttggcagcaacacactattactctgccatattcttctgctcacatgtgccaaccctggtacagtgtgagagaggactactcaaagttgtgagtatctggaggtgaaggcctccttataaaaggactaagtcaagtggattcaagagatgatgggaaaagaagtggtggcaattgttaactcttggagttttgttgtaaagtcagttggaggggataggaagaaaaatgagatatgggcaaagggtgtgttgtcaattgtattatgtttgtgtggttttgagaaagaagcagcagaaaggggacatttgatcatgagaaactggggacaattgcaggagcaatattcttgaggaggctttgggggaataggggtaaggagaagttcagatagtgcacaagccaaggagttgcccttaatgggagtgctgattgttcagtcctcacaataaatgagaaagaagagtaggacagtctgagagtataggaggtcagtatcttgatagatctggtttcagagtgtatgaaaagtgtctcttaattccttctattttgtgataaaataataagctcatcaatgtaaagacagagaacagatgttggaggtttgaggagagagaaggtgagaaatgatccatcatctctgggaggagagagtgctttgtctagagaaatgtgaaattcccagacggcactaaggagccacctcaggccagtagttacaaattcaaagtcatcatggttgtgtttttcctcaactatcattgactgcttaggccacaacaagcacggtttgaaaaaggttggtttaacagagatgagatatttcagtgaagtctgagttttaaaaggatatgcaaagaagtgattatgctgccatatttactctaagctcactaaggaaaaggggacataagtttggtgagggtcagaacaacttctaaggtcaatgcactggaggactcattgggtttggaagatttttggagtcagaatactggaggggatgagctagaaagagagaaggtagggagagacgcttaacagtggttatggggcaccgttatctgtcatggcaaggccttgcttatggtaaggaaaggaggtttcaggtaagattatctgaagggagatccagaaactgggagaccgtgggaggaaaagataattatgagttatgtaagagtttgcgctggagagagacagggctaaaatgtttaaagactgagaggagagacctttaggtcagtagaaaactggattaggaggggagcagattaatgatgtgagttacaaagacattttagggcaaggaagagatcatggtctggaagcagcagagaagaatgagaaagactcctacttcactaggggcagaggtacaaacatgtggaaggaaaaatagccactgcatcagagggctgaagtaaatccgtattctcggtgggcagccagtagtgtcagagcaagatggtgcaggaaagtcagagaacatgctgaagatacaggagcataaggagattttgctgatgacagactgaacgctaggagtcacgctggcgagtttgcaggaattggggaaggctggggatttcaaagtaggggatttacagagccatctggtgatgagcaatgacctggcagtcttggactttgtgtggtgacggttgtgtattcaagacaaggaccttggttttaagaccatgtagtcagacaagcacaaactcctctgctgggatggccggtttctttggtctatttaattagttccagaaacagtaattcatcctcactgcatttatagaaattgaggggagaggtggtgggtaccagactggccaggtctgcccagtcatcttcacttcaacattcctgtctggtaaagtcatattattctcacatcttggccgtgtgtgtatgctccaagaatgagacagatgacagaagatacagaaaaacaattgggaaattgctagtttgcagatgtatagccctggcacagattttctaatatgaaattgccattttttccatgatttggacacaaaatcctgttcttgaatatgatgttcagcctagatattgaagaactgaaaaatatttttgaaaaaatatatatattgcatttgtcacaacagtttatacacataattatcacaatgatattgcttttcttaaataaataggttttatgtgttggcatgaaatacttttacaagatgatgccaggttttaacatttatacaggaatattttcattatcataattgttaataaaacaaatatgaaatgtatagctttctctttggagtttgaattgttggttcttactgcctgcttgcatatttatattagttgtactggctggcagttattaggaaatacgatcttctgtgtcttaggagtgcgccctgcaagcaacatgtgcaaacatttttttctttctttctttttttttgccctaaggaaaagggtaagctctggcaccttttaacctgtaaggattatgtggctcttgctgtgattgattggttggcttctcctcaagaaatgctcctggtgcgtattttatgttctcacagagccagggctttgctgatcagcacgtcacccctgtcaagacgtgggcttgcttttgtgcatttgctcttgcagcctgggaagcatatttcaacacactgtccagaattggctagaacatgcctgtcactcccagctgactctgatgacgctcttgccaacgtagatttacatcaacacagttctttactggaaaaagctcattcagaatatacagggtggcccatttaaaagaggcatagcgtcaatttgaagagaaatatattttaaagggagaactctaagaaatacacagtcaattgaaggctccatggagcatagaattataactagcatcacccgagaatttttcccctggagattgtcctaagctctaacttctagagactggcttatcctgaaaagagaacctttctgttctagactttttctttcagcatgctagatatgtaggcatttttagcctcttctttccctaaccatataatctgaacaccatattcattgaagaaagcatgagatgtgaaagctgataagatgcaggattatgtgacaccattgctttttacctgtgcaaaattcagtttggtaatcaatggaaatacagattttacccttcacataaaattgtttggcatatgtccatcttgttttttgactcatccttgatatcacaatgaatgtttgggataggcatattactcagatgtgtgggtctatagacaggaaatcaggcattcagaaataaagcttgttaccatagctatccaggaaaaaaatacaacactgtctttgctgtacaaaagaaaaattcaatactactgtcacatgatatgtgattactattattatgacccaatgctactcacccttcattttcatcattctagtctatttcaggtcattacagtaatggatacaactgaatgggtttgtaattttaccccttctctcatgacaaccagcaggattctcaatgacacatgctttgatctgtctgcttttaaatctcttaagcagggtggctctagatagcttcctctcagaagattttatgattctaatagacctcatgatgagttctatatttgtgcttgtttagatacatcaaagtcaggctttatactagggccacctggaaagttaaggtcatcagctttttgttatagtcattggattactgtgatgctcagcaataacaaagtttgaccttgtaaagtgatcaaaagttgtgggttacaatataggaatattaaagtatattctgccatgatgtgtcttctgttgtagtttgtctagaattaatattacagtcacaattaactccaaagtgttctatactgcttgcatacagtacagtgggaaagaagagatgtcaaaatcagagaaataagattcctccattatgaattaacatacaaaatctacacttaatgcatcagaactaagatgcaatgttttaaagagattgagttgacaggtcaatcagatggtaggactggtaagaatttgagcaggcataaacaattggcagtatgtattcaaacactgtttatgagagtgaggaactattggttaacaagctgacattaagcatttagattatataaatcaccttattaactgcattctatctatggatctattatcgatctgtatctatctatcgatctgtctgtcatcttttgttttgtctggttccatgcttccaaagacattttctgatcttcattgttacatagtactctctactgagtcctaaagaacacagttctgtgtcaggctgattgaagtgtaatgatttgagtgatgattgtagtgctcaatgaaaggaaataaagaatatttggactctgttcagcagtcatatgggcttgtacaatatgagtctgcttttgagagaagaaacttgcacaaatgtctctttaagagcctgcttttaattcttttgggatatatatctaagtgtgtcttaagatagttctatttttaatatattttttcatactgttttccatagtggttgcaccattttacaatcctatcaacagtgcacgagggttcaatttctccatattcttgtcaacacttacgtgtgtgtgtgtgtttacagtagctatcctaatgggcatgaaattatatcttattgaggttttgatttgtatctctctattagtaatgttgagcagcttttcatgtacttgttggccatctgtatatcatctttgaagaaatgtctgttcaagttatgtactcattttttggtggagttatttaatcttttgtttctaaaatgttttgaatagatcaaggtttaacagtcattcctctgtgtgcttttatgtcatgtttagaaatgtgactccattttaagcttcttaaatctttttttactttaccattttttgggggctctctttttttatatttaacttttgtctatctgtaatgtgttttgattatgaagaataaggaaaaaatttagggtttgtttagcttcccaaaccccactttatagaataatcactgatcatgtactaacttataatacttgatcattttaagtaggctttgttattgagttccacatttggcacacctactggtgtaatgattgctctagtattagtgcaatagtatcgtgttagattttgtttgcagtgtgctaagtggtaaacctcagctattaatctaccttgactaaatatgtaattgttccctttattaagccctattttctttcaaaataaatattaactatgtttcccactcattcttttttgggggaagagtaaatataaagaaatgtttccagcaatgtgggaggccaatgtgaaagaatacttctatattatagaatgactatttttgcaaatgcaaaatgataacagaattcccagataaggaatagcaatgactgtttcagggcattacctaagtgtgtttcttgggctaaatttagaatgcctgattactgcacacctggtatgaaaatagaaaacccttgtgcctacatcacataatgcttaccacattgaggtacagataaaagaagttctagaattagggttgttcaaagcctggtttactatattttggatataaaatggagtaaatctcataatccttctgaacattggttttctcacttgctaaataggaataaataacatgcatgaatagtatagaatggttgtccatgtgtctaaacatgataatttgtggggtatgtactttataaatgattatatgcaaaaaggatggccagacgcagtggctcacgcctgtaatcccagcactttgggaggccaaggcaggtggatcacctgaggtcaggagtttgagaccagcctgaccaacatggtgaaaccccgtctctactaaaagtataaaaattcaccaaatatggtagtgcatgcctgtaatcccagctactcaggaggctgaggcaggaaaattgcttgaacctgggaggtggaggttgcagtgagccgagactgcgccattgcactccagcctgggcgacaagagcaaaactccatccacaccctaccctccccccaaaagaagatgatgatgatgatgatgatgataattgatatcagtaacaacaacagtaatactggtgatagaagatccttctggtgcaaaccattctcaacaatatgtttgctccagagaaggtagggccagactcctaatcccaatgttgtttaaaagcccattcagattatgaattcatttgaagcattttaggacccgagagactactagaagtttaccgttaaacttagatgacatacagttagaaaaattttccatagtcagctttttcttctcctgttatcttctgtattttactaagagaatgtttagttttaactactagaaaaacgtaatttcaggttgattaaaagagaagaacctagatatgtaaataaagatgaatcttttagacatgtagtcagtagctttcatgttactaatgaaaagttcttcatatcctatgatttgaaagaggaaaatcaagttttgtggaagaaaatacgtgaaattttaaataaatatacggcaactttatatagccagagttaattcttctttttcagtaaattgtattaccctgaaacaccaaaatgtcaatagtacaattatggtcatattgagagcacttgttattagacacaccctttagatttttttcttttgaatagaaactgcaagaatttttaaaaactgggcttattgactggacgaagggttttaaaaagaacagaaagacaaggcagggcaaatcctggtgtatttcacctgcgtagtgacatataggaagaagggacctttcagagatcatcttgagttttgactagatgataaaactgaggttcaggatggcacagaaaagtgtccaaggtcacacatttaggaaaatgtgggacatagacacaaattgtttgatgtagttcagtagtctttttagtctgacccagagcctttggggatggggacggaaggagattgggaagagcttgtcattgattcagtatctctgctcagtgccctcttgaggtttttgtttgtttgttttgtttttgtctttctggtatttttctgttgttttgatcctggatttggagtacaaagagactaaaccattttccatattgcatacctgactttgacttacactaggtgcattgaatgcaagaagcagttatgtagaaatgaattaatagataaatttactgtaaatctagacctttattgttgttcctcctatgctactagttagctgagtgatcacaggcaaattacttaaatcctcataggctcagtttcctctaatttaaaaggagagtgttgggtagttgatctctaaagtcctcttcagtgcaaagtgctgtgcttgcccctctttacctgaataattcctaagattgctgaagcatcattatctccttgttcttagctactgattgtatatttaattccacaattgggtttatctctattttcattcatgcatctttgtatcattaattccgaagtctcatataaaatctttaattcaaaaaattgagtgatggtacaagaaaagcaaactgcctatgaattccacgtgattgtgcccctatttacaaggtataaatgtgttaagaacttaaaagtttttgagtattgattattgttgccaagtcgtcaagacaatgcttataaagtaatccattatccttttccacactcttttcccttttagaacaaaaataccagcaagaaaaaaaaggatgactgttccaggtcatcaagaaagtagactacttggtcattatcaaaaatattttgaacatgtgggcactttataaaacaaagaataaacaatagaaaattatgtacttagaaagtccagactgttaataattttctgcacttaacacagtaagtgggcccacagacattaaggtactaaatgatttatagatgaatttattattcagtttcaggacaccagcagcaataaagtattttctacttttataaataactcatatggaacttttatctagtgatacactaactcttgtgttagaatgtgtaaagaaaatattttataatgcaattgtacagtgttggagtgattaggattcaaaccttcaacttccaatgagaattttaatacttagtctttaaaaatagtaaactgagatttatatttatgttatttcataccatcctatattccataatcttctataacatgattttatattcctaccttttattcaaccattctcttcatattggacattggctgtttttaattgttttaagataagcatacttgaaggtcaatcctggattggtgcattaagatgcattctcagaaatatgatgtatagagttaaagaacattttaaaggtgacatcgtgttctgcttttcagagactgttagcagtgtgcttgtagcgtattacactgctgtatcgctgtatcactgcaccatctcaaatattgagtttttttatagttaagtatttataaaattaatatgttggataaaatctaatttatctcaattgattaacattgaggctgcaaatatttttatagtgtaaaagaattttctattgtgaattgtacattagtgtcttattgagacattaacatttcctgtctttgttgttgttgctgttgttgttgttgttttgacacagagtctcattctgtcacccagggtgaagtgcagtggcacaatcttggctcattgcaacctctgccttttgggttcaagcgatcctctcatctcagcctcccgaatagctgggactacaggtgtgcaccaccacacccagctaatttttgtatttttagtaaaaatggggtttcaccatattgcgtaggtcagtctcgaactcctcacttcaagagatctacctgtcttggcctcccaaagtgctgggattacaggtgtgagccactgcacccagccctttctccctcacacttttggaaaaaatatttttctcagtttgttgcttgccatctaatttattacattgctttttaatatacaactatagacaaaagaatcacttttcttttggaaaatttgatctatgactttcattcatataaaagctttcctcaccctcaggtcaatgttcacctttatttttttctagttttttttaaactttgtttttaatcactgtgaaaataattgaaagatgatatttagataaaaatttgtgtaaagctctactattttgatacagattgaaaaggataaaaagaaatgagtaagaagtatgcgtagtgtttagaatgaacatgaatgataaactaataggtattattttacaaattatagaatattaaagataaatatactctagagtatagaaatatattttatattattatgttaaaatattaaatatttcaggcatgtaaaaatagatgatagtgtagccatttatgcatcaaagagttcaaaccatacaacactaaaggtaaaactggggcccctagtgtacccttccccaattctatcacctttccttcccacccagaggtaactactattatgtgtttacttttcttgagtatgttcttgaataggtgtgtattcaaaagagacagttcctttttgcactttggaaaacaaataattctgccttcccccccatgattgcattttatatgttttactaagatatttattataataaatattacaccacttttctctgtcctattcatggggaaaggaactctttttgttcaaaatttgtcattcttatattgtactgccccatattctgcaaatctgacaacagaatacattgtatgacaaatgtgatgtttggtacaaatatgtcagcttatgtatgctgttgcatgtgttgctcagcattgcgtgtattactgagcattgcatgtatcacttagcctgtctataaaaaattgagacatttatttaaataataattgtcccacaatctattcatgtttatgcatgtggatatttgaagcaaaatatgccatagaaacagtatctcttgctcactgaattttaaagtattttaacatcagtagcaagtgcataataaatctttaatgtataatacgaactgatagaaaaatagggctctgcatattttttcttgaaaaacaaatgtgttttgagaaatatagctttgtctaatgctgcctttgtaaaaccgggaagtcaaaagacaaataatattttgattctatatgttatgttgattatatatagtatgtatgtgaatgtgcataactatatggattcatatatgcacatatatacacattcatttatactcatgaaaatggtaaaaatccagctaatgatttaaacattgggtcaatagcaatatataaaaataatattaaacattcagatctttgcaaaatctaaatgggcttgtttttaattttcatgtggacatttgaaattttatagataagactaacaatatgttttactgtactgtgagaatttaagattaatgaaatattatgttattaatttcttacatttgtaaagttgtttttcacaataccgtggcctattagattgctaagaaattatgtatgtcaactctttctttatacaaatattgaaaatgatagtaagattaaggaacttgcccaggtcacaatttttttctttcaaatttcatggctgatttctaggcaaaaatttcaggggcctgtccaatacgcatgaattaccctactataaacaaagctagggaatttaatacataccgaaaggcattttgtaatatatcagaaactatacaaaaccaagaatagtcataaaataacattttaacatttttaaaaaaagattattccaaatgccctcacttccaggaatgcgactttaaaagcctaggctttatgttatgtcatcaaagtcattgtactcaattagacaatagtgctataattaattaaatgttattatgtaaatgcagaattaccaaagagaatttcaaagagtataacagtattaagtcgtttccttagtaatttctcattgctgtgaaaaacatctgtaacctaatacatttatattcatttttcatattatattatgcacatattatttttaaatatttgttaacaggtaattttctgattaccaaagtaatacttttgtattaaatgtttgaagactgcctccaaaaattgcaaagaagaaaattttaaaaccgttataatcctacctttgaaataattattcttcaaatgttagatatttggaatgtttccaggtgtttactggtatagttaatgctgctgtgaacatctttattgcacataccttttaacctctgtggaactgattgcttctttcatgatttctcctatattttgtcaatcatttcctttttttctttttcttttttttttgagacaaaatctcactttatcacccaggctggagtgcagtggcatgatctcggctcactgcaacctctgcctcccgggttcaagcaattctcgtgcctcagccttccgagtacctaggattacaggtgtgcaccaccatgcccggctagtttttgaatttttagtagagacagtgtttcgccatgttggtcaggctggtctcaaactcctgacctcaggtgatccacccgcctcagcctcccaaagtgctgggattataagagtgtgccactgcacccggccaattgtaagaattattttcaaaggaatttatatcaagttacagtgccccagaatattctgttattttagctgtattgaatatcataattttcttaacatgttttgtctttagatggtataaaatactatctcaatattattttccatttgtttgtttaccctttatatttccatttgcttgaactctctgctggaatctttcaatatctacctgatgaatcaatgtttatctgttggtttgttttctttttttttaattaattaatttattattattatactttaagttttagggtacatgtgcacaatgttatacatgtattttatttctttttgtcacataaatttgactctttattttaagcaactatttctagtcttttgtttctcttgttttattaaatttttattgtaaagaagttttgttttggccaggcatggggtggctcacacctgtaatcctagaactttgggaggccgaggcagatggatcatttgagacgaggagttcaagatcagcctgaccaacatggtgaaatcccgtctgtactaaaaatatttaaaaattatctgggtgtggtggtacatgcctgtaatctcagttactcaggaggctgaggcaggagaatcacttgaaccagggaggtggaggtttcagtgagctgagatcgggccactgcactccagcctgggccatgaagcgagattctgtctcgaaaaaaaaaagttttgtttctgtgatagatattttgcttagcatgcttgctttttatatttagaaaaactaaatctattccatctaaaatatattttggtgaataacgcaagatatgtaatctcagtgttatttataaaatgtaccattctcactttcttattttgtaaagcttgtttaatttcagagtttgatatattgaagagtcctattccactgacttaaaaaattgaggcagaaggatccccctcaagtgtcacatcttagaatttgtttgatggtacttcaaggcagttggtgaataatttagaactcaaactttgggctgcagattgcctgaatacaattaatagaaaacaaaatatttcctcaaattacattctttgacattagtaatcattcctttatatacatctcaagtctaaactcccaatctgtttatatgcagagattcacagctttaagatttatgtttcataactgcaatatcactctatgatacattaatgggattctgtactcaactattccattggcattcaagtgaataatttttatacaaaacttcttcaggagacaggcccaactgaagtgtatcactttaaaacaaatatcctatgggcaatagataaatctgatatttttctgagtagaagaaacataaaacctcaatataggattaatagggttcaaggggttttataagcacagtgcttgtgaaagtatgtaattcctattaaggcttgcattcatgagcacatcatggtatatgctctctctgggaatatgtaaagccagtttaaaattcaattacagacattgcagtctagacctccgcaagcctttgcacgtgactggactcactcaggttaatctctgaaccagttgtagagagcttttttcatctctccctcacacatttccaaactcttttctttctgtgttttttaactgtgacttttctttacaaaaggaaaagagaattttttttaagtccatgacatatccaatgaaatcgaaatgatttaatacatggagttatcttaatatcttttgcttcttgacagttctctcatatctatctagaaaatatctggccaaaaaaacccactttactttgtttatgagatattagattattttgtacattttcacattccagggctacaaggagaccacagtagacaaaatcaaaccgtcttccttttctttataggcttgtctcagcaatgcagcactgtaatgtctcttacttgaaggaacttcattctattgtaaattcttaggacaaatagaataaggagatagaagagttgtgtgagttataacttatatgtaattttctgtatatatttggaaagttcaacatcagatattgagtctatttcagtctgttgctgtgaatagaatacactattttatcctattggttcttttcttaaactgtcaaccatggtttgagcatagtttaagaaaaaaaaaatgaatgctttaaataaaaccagtacctgggttggaggtggcaaatatatacaaacctgtgtatgtgtgtttgggtgtgcgtgtaatctgaggattatagccctgtatctgtttcagggagaattttttttacatcagaccatgaaattgaaaggtgattctgataatctatttcattaaatagaagtttatgataccatagactctggaataaaaaattccttaaaattccctatttagattaatgcagatttaatccttaacccattggttcaaaactcaagtttactctttcagtaataacaagaagtggttgtcaataatactctcattaaaaataattatttcagcatttaaaaagtaataaaattggtattttctaacttatatgcttaatactcatccacaaaggttaaataattaagaaattaaagactgtgaagaagaagggaagaaagaggaaggaaaagatggtaatatggatgctattaccattcacaaaaacaacattgatgattaggcatatgttgacatttcaattttttgaatcttggtaaaatagtcattttaataacatacttaccagattacttaaagtaacatttcaactctgtttcagcacagcagataacattctaatccatgtaatcataagtagaaaaagcagaaagaaatagaatcctaacactttccaagcttccttctcttttgttagattataattcatgtacatccttattggggtatgggagacactggaacttattatactacatctcatccatttgttctgtctccatgactgacttctcaaaataatctaaactcttcagtgagccctttaaagtcatggttttatcctatatctgtccaggattttatctcacgttttgcatgtatcccagctcaaaaggattacttttctgaactttcattgcccttggattttgaccttccatatacttgaaattctctctttttaatatcaccaccaataaaaatccatccctcaagacctcacccaattattatttcaaactctaaatgctgatcaactatgtggagctgaccttttcatcctgtaaataagtgttattttctccttaagggatttgccacatgaaaactttgcaaacaaggacagtgtcttattcattttgaattctccattgtgcaatttctagctcactgtcatacagaacattactatcatatttagaggctgaataaatcattaaatggataccatcactgggcccatggaattgacttacttaactcaaatccatgtgaaagtcacttaataaatattaaataccatcaattctcaattattcatggggttattattcacaacttacttgtgatatgtccttaaaggtcatatttacataatgaatgattctgcctatttcattggcataaataggttcatttaaacagatttcattatttaattagctccaatttttcctttaccatctttttcagaaggcaagattttgcttttagctgtcttgcctaaatctgaaagctcatactgatcatttccatttaataagggaagatgaaaagggccggtcaggggactgggatccaaaaggtcaagagttttccattccttcttccatcagatcttcatagtggagttttgttaatttgtgaatttagttcaatgagccaaaaaaaaacttgctgatcaaaacaaagcccctttggtagggaggaaattctgtctctttgttttctcttcctttctctctgtgcgtgagtgagtgtgtgtgtgtgtgtgtgtgtgtgtgtgtgtgaatgtctcctgacatttgaaattcacagtgcaatttaacaataaaataataaaatatagctttttacaaaaggtgtaagcatagattaatgtacaggttttcagagaaggacaggttagcttgcttcatttttaatccttaggtaaaacagaggaagaggaaagtgaattttattgaaattcacactatgtacaatgaattacaagagaactataggaaatggttagatatgattaaataataattattttgaaattaagataaatgtcaaatgggaattatttgctttttcattaggaactgcaatgatgtttgcgcagcagtgatctatctagacagattttggaagatgtcagcaattttgtttagtctgtcagcatttgcagtggcaatgattgggatttacttgatgcattcactctggaaaaaaccttttgtgcacattagcatgacaactggtgtccatgaaatacaagaacaacattcagttataatgcactttacaccaaattaatgaatagtttaggaagggaagcaagagctgacttagatgacttacaaatatctgcttttttgcattttctaaggtagataatttgtgtatatttactttaaaaagtattttgtaagcaaagaaatgactgaaggaaacattaactccaacaaaacctaaattaatgtgtgtcaatgtaataaacttaggaagaaggcggttgcttgaaatattgtagtctggcaccagctccttcaaaatggccatgttttaaaagtatggcaggtgtgctaaaaagtctttattgcaaaatcattagaaagtctttttttgtcagtttaaaatgcattcagctataagcaatagaaaactaacaatggttgaatcatctaagggtttgttggtcttgtggaaaaggatatcaggaggtagcaaactagggctagtacagtgattctatgataccctcaaatatgtgatttccttttattctttcttctgtgccagccatcctcagcatatgggcctgtcctgtgcttgtcatctcacgaccattggcggatactgcttcccacggcacwatctcctcattccagggtaaaagaagagaaatggaaaggaagtaggaagggatggtgtctgtatcagggaaacaaggatttcttaggaatcctcagcttatataaacccagctaccttgcccctctctgacaacctgttctttggcaagaacaatttcatatacttgcccctaccttccagggaagctgaggagcttgttttttttaactagacatattattgggtgattaacattaggcttatataaataagaatgaaagggagaatggatatcgtatatacaatcagcagtgtcagccacagtcttatagttaagtggacaccactaaatttggtgggattagaaaagcaattagttggtgagatataaaaagcaatataacataagggttttcaaacaaaatatcagatgatattacctgtatactattatgttaggggtataataccataaatatgctaaattcagattaataaaaagtttttcactttctgcacaatcatgacctccttttattaaaatagacaaatagtctggggttagtcacacaaagtctatatggcacatgactacaataattgatctgcaacctctctgttctttaaagtgattctgtgatatcaaggagtgttgaaattaaaccctggaagccacagaagatgccaaatggacacattttgtgactatttatagctgatccaaaaatgaaaggggagaatgaggaaactgattgatagtccccaattctgttttgatctgaaatagcttgttaaatgaatctcattgtcagagctagtttaaataataaatgtctctactctccactattccgtgcatatgtgagtctgaaagtaaaagtttgtaattaaagtgactgcattttaaagtttaaaaattgatctcaactaatagctaatactaataaaataaataactgcattctaattttttaattaccctggtttggaagcagaaacatgttttgtacatagctgtaatgttatttcactttaacctggttgtccccagtttagtatctacgaagctttgcacgtatcggaactccatacctgcttctcccttggtttctcttctcagtgataaaggatttgacttctttcttccccattccagcttgcacattcctgaagttttccggcttggaacaaattatattactaggtctgcagtatcatttagattgagaagtattgtgatagagcaaggttcaccctaagtattgactcttagaatctgctcattccatagtctgttgagtgcctttacctgtcactgttgtcctaagcaccaggagtgtagcgatgaaggatttctagtcctagttatctaaggactcacaattaggtttctattctggggctattttgtacatttgtgtacaaaagactgcatttttaaggtgtctgacttttgacttggtttcagaaggcataagaagttggtttcatggttacaaccccatgcccagaaaagttaagagtggtatttttaattaatttgtaactagaattaaatatagctagaattatataggaatacaacaaaagattaagatgtatatacatccctctgaataatataaatattgacaggctgatattgggttttctagacttactttcgtaggtattttcttagtatgaagatagttaaaatatactaagtgaaaaaaaaatactcaagtcactgtattagtggttccactagtaaaactacagacctcatctgtttctggaatttgcaattttaaatattgatttttggaatgtggcgacttacactgcctacttttagtttgccaggtgagctcatttttgaaaatatcctatactctgcatttatcctttgataaaatcatggctattataaattttaaaaatggtaaagatcatgtcagaataatgaatcgtgcttctaatttgataaatgtagcttaatcacaaatatacgaaactttctgttggtctggtgcaaactttctcaaggagaagatttagtgtttcagaaccattggagtagatgctatattaaacattgaggctctctcacctttaactttataaagctaaatatagtcaacaaatgaattggaaagacatattagtaaaatctaccgagtctaggcaggcctatgtgtcaggccaagatgcttcctggaattattctgttcagaatgattcctctttctttctcattctctaaagataggatgtcaacagtttcttcataaatgtaaggttataaaccatgacatttgtgaaactattgcaataatcttgggttgtgtagggataggatgacattttcagaggaaattctctaaacactttcacattaataacatctgggagccataatattataagcataagaagtggatctcatataaaaacataaaatatttttttcacatttatatgaaataacatatgtacttgtaacaactgagagtccctgatcaaattaggaaatctacagccatttattttaaatcttgctctaccaaaattggattgagagacaaattaaacacaaatcattagttacattttataactatagaggatgtgcagaaaacaaatattcaaacccaattttatgtactatattgtgccatatagtcacaggaaatctgttttccttctaaattattaataatttaaaatcatgaataattgtttatgtaagacagctggccaggctattaagggagtacagctacacagtaacaccaagagtgaggtgtccatctgagctaccacatggagaaagagcagctggctttgccccaccatattcagttgaaagctgcttattactgagcatttgaataacttgaaaggagagaaaaggaaagaacaacgtcagggtagaatgtttacttgtttgagcctcccaggagaaatgccatacaaagatttgacttgatttttaaatcaaaccaaagatctttcagattacattggagggctgaattgaaagttaacattgtataagttgtattatttttatgttcttttgtattatactatgttcccttttatattatgttcatattaccatgaactttagagtcgggatagatcagagctcaagtcttaatgtcatctcttccaaactgtgtgacctgggaaagacatttaacgtgtctaagcctcaatttcctcatctatcaaatggggataatatgtttactgactacaaattaagtaaaataagacctacaaaactgggtgctactgtatgataacacaacagttactacagatgctattattattaggtcacgtgtgtgaagagaaagtaaaaagaagacaagatgcaaagataaagaaggcaaaatgcaaagatcctatttcaatgaagccaatagtagtctttcaagttgctgttccttcttatttctcttccttccaataataataattcctattgtctaccaagtattgagagcctgtcataggtcagacacatggcatgcattgagagaaagagaattcaaattattctcttgaacttttgagcaactctatcaatgggtcttatttggttccatgttactgctgagtaaaagaacatgctcacagagggtaagaaacctgcccaccagcaccttaccagtagacattagagtcaggactttaaacaggcttttggactccagaaaccatgctctgcctactcaaatttagtagctgttctgaggatctcattctcacttatttccccttttttatttgtttgtttatgttctaaccactgatttgaaacaaattctcagaccagaaatttttactcctgtggaaagagtaattggatgttctcattacaatatttttttcttcatgaatgtaatcaaacatcagctggaagcttgcttttaatgcgtggataaaccagcccacacattttattttccctgaggcgtattgctgggaaaatctatttctgattttaagaaatcaacatatgctgaaccaactgtctattttcatttaaattgacaggagctgagactcaaaaattatgttgtattttccacttctaacattgttgatagaaaagttgaggtaaacactttattctgccttagatgcctgctaaattagtctctctaagtaaaaatgtcaggaggctattgttggattaatttaggtggagttgatacagttttagggaagaaccgttctacagtatgagaacaacttttaatattatgttagttataatctggagcatttatcataccttattatatatcgtatgttttgactttctcctctattgggctgtgggctcaattaagataagaatgtatctcccttatctttgtatatcggtgcttagtgcattgcctggcacatagcaggcgctcaactctgttgaattaaatgatcaatgagttaaactagatggctatatagttgatcttctatatagttgatcttctatattcaaaatatagtttacatatatgtatgcaagtgtatatgtgtgtttatgaataagaagaactatatcttcatactgttgaaaagttatattgtttctcatacagattttattcctttagctaaagttgtatcaatattaaatttataactaaaacgatattacgttggcacatgagggttttagtcagctccagctgctacaacaaaatactataatctggataacttacacaacaacagattaattttctcacaattctggaggctgaaagttctgaaattagggtgccagcatgtttaggttctattgggggccctcttcctggcttgcagtcagtgccttctgacatggtggagaaagagcaagctctctggtgtcttttcttataagagcaccaatcccatcattgcaggccccaccctcatgatctcatcacctcccaaaagacccatctccgaatactattacataaagggttagggcttccacaagtgaattttgaaggggacataattcagtgcatagcaatgagtatcttgtaggcttatgaccatataatttgaagctatgatttatgtagaagttggacaaaaatgtttcacataattagttatgttcacatgatctaatgcctgaaactcatttttaaatatgcctgaaactcatttgttaaaattatagtgttgggaaaagaagcatttaatatttgttagcattgaacttaaaaaaaattaaacacattgactttagagaaatgtatatgttgaagagtaggtgtggatgaaatgaaagaagagagctaacccttctcagtgccagacacagtggtgtgggcattaataattcaaccctcatagcagtccttagggtggtcttaaccatttcatggggaaattgagactcagaagtttactaatttggccaaagtcacataattgtttagagactgattcaaatcaatgtcttctttattccaatcaatcttttagggaccttatctgttatttatatgaaaaaaaacaactaactttaatgtttatggagtttgtttaattaaataaagcccttaggatttcaaattgtttcctaagtccaagagatcccaatgagaaggaacacaaagtaatttttaatgatttaaagtaaatgctttagactgaaatggtagcttctttttaaataacatttcaaattaggtttactattaacatttacaaagaaccagggctataaatcaactttatatgcagtgcattccattgatcttaatagttgtatttgcaagctgagtagaagagatttacagttctctctcaagggatagatctccttttttgggcaatgaatatactccttcagaaagtcctcttgctcttttacgtactcttttttgcttggtatttcaaaggctttttgttatactttaaaaatattcaacaaaaagtcactgaatatctacaatgtgtttatatcttgggtgtaatgcctaggttaataagatgcatagaaatatggacccagtgctacaggcccagcagtgagcaaaactcagggaaacaagtgacactaaacagtgtggagaatgcaaaggctaaaggctatatgagtcctggcatgagcacggaggtatgggctgagcagcgctgcctgaggaggtgatgtacaagtgggtatttatcccccccgggcaaaccagaaggaaaggtaaagccaaggaacaaagtagacaatggagatggtggggaatggagggagaagaggaaagaatcttggagagatagtcagtcttaaggtccaattaaactatttcatggcagccattattatcctgaattttatggatgaagaagtgaggttcaaaaatattacataacttgccctgtgtgacaaaataaatgaaaagcagagccaggttcaatgaaagtatgtttgacttaggttttaaaattctagtcataaatggcaatttaatgttgttatatatttgtattgggcttcagcaaaaacaaaaataaaacctcaagtacacaaaagctctagtaatagagccatgtttgtgcagttatttccagcaatccttggaacctccaaaattctcctcagcctgacattatatgccctatgtgtcatttcattatgtcaccacctggtggtgcactcacacccactttgggagaaagggggttagagaagggaggacatctgtggacaagccaataaaagcatttactggcatcgtgacttcataatttacacttttatttatgcataattaagtataaataaacaaaaacatgtattttctaactgctacctgttctgtttccagtcttgcttgaaaatcatctttctcaaaaaactacctatcatgtgctatgcccattacctgggtgacaaaatgatctgtacacccctacaaaatgcaacttagtcatgtaataaagctgcttatgttccctctaaacctaaaataaaggttggaaaggaaaaaataaataagataaaaattatctttctctatcagagtaatttgacatcttgaggaagtgatcctgggacttcatattctttaggattcaggtgtccagataatcccagaagtagccagcaatttggccatttggggtgtagaaaccttcatacctaggttattgtaatacctcaggctattctctccaggtttccagtgattaattagctgtgaacctcaaccaacacctgactctagaagagtcttcaaataggtcctagaaggaccaagtaaaatcaccatccctcaatccctcaatttttcctttttccaagtcaagaataaaagaagtctgggaaacattgccaggtcagcttctttttaagctcatgattttctgctacctgagggaaggagagaaggaaaaagaaaagaaaagaaaacctcaatgaatgctccataacctggattttaatctctctttccctttttgggataaaattgtttaatgtaattaactacaaggagaaaagttaaccagtggcttctgcttttgctgaaagcactttttcaaacccagctgtcatgtcaaatgcattcaatattagtttggacaactccttacgtgggtctcagaatgcatctctaaagaaagtgtttaaatattttttaatgtgaaaacccatatgggtattttggtgataggatttcttctatgattcaggaataaagtataatgcccaaataggcccttgccattcctatcagggacattgcatccataatccattttccatatccgtttgtatgtaaatgaaaagtctcacacatcacaacttctgtttttctcattgtaggatcgcctcatctgtatttatccacattagtaaaaattatccaaatcccagaaatataacaatagtccgtatttcttgagcatttactctgttctaggctctgtgttaaatgctttgcatgtaatgtctcatttagttttaccacattctatgaggtatttactctccttttcttatatgggtaagaaaacatgttgagttattcaggtaatttgcctatattcacatactggtcatgagaaaactagaggacccaggagattgaagcccatatttcatcatttgactgtcctaggaaacgccttgtatacttgtttttttaaggtattctgtcacccaagaacattgaaggtatatgcagattctcttttcctgttctattccactagacctgaatatgagggatgaaaattgctttggttttgatgtgacttcagtaccttctgtatttgacacagaggtgagtcacatcctgatcagtgttgaaagcatttagtaagattattagtttataaagaaggctgaaccatgactatataataatgaagcaattgtaaaaaaatcagaaagcattcacattcattccttgaatttccaaaagcattcaacaacagaaaaagggcaaacacgtttattccatgtatatatactgaattcctactatgcaccttcaacaataaaggcttttggtatataggagtatactgagcccagttagattcaagtgaaattcctagtaatgtcctggtatacaaggagcttaaatgttcaacatataacattgtttcttatgataggtttcacctataagccctctaaactgtttgtaactctataagaaataattaataaaccccaacaaggtctatttaatgtcttgagacagatcattctactcactttagatttcttatagataataaccagcacctaaaacaatttttaaagacataggaaatccagaataaatataactatcataggaacatggaaagaattaaagaaatggcagaagttgggaaaaaaactactggaggaaaagggtgaaaatgtgtgacaatgaagatttgcaaaggttctagaatactttaaattaagttagaataaacttttagttgcactgtgctttgactttttattcagcctaaattgtccttttaaattcaggttgttcatctccaaggatgaatgtaatttaactgaatcttgtattagagacttgcacatttctcactcattaatatgatcaaaagcatcttatttatgtcaaaagacgagaaacgaaggccatttttggcattgtcctaaagttgtgctttcttgccttattagcatttcatttcaagcaatagattgaacagaaatgcttgtgattgaatgaagattaattatagggtatgggaatattcaaacctttttaattgttctgagtagtgtcttctgctgttttgttatccaaaagggagtaagtatttggggaacaaagattgtgacacatctggtaatattcaagatgcacaccccctcactagactgtcaaaaggctgggcttgtcacagatgtcgaggctgtgatgtattgtcactcttgctgcacccatggatgcgcctctcctgatatgcgactcccattgggaatgtgaagacacagaggagatttttaatcaagagcataggtaggagtcaatgatgcatagctggcagatgcagatttcagcctgggaatatttagaataatttggattgctttatagtttatagtagcatcttttatgcaggactctgacctaattatttcaaaaattattgctactgattataatctcattgttgctttcttttatctattcattgtttaaacagcatttttagggggcagggtagggagaagcagtgtagcttggtaataaagggcatatgatctggacccagcctaccttggaaaatgattaagccccaattttcctatatgtaaaatggagacaatactagcatctacctcacaatattgttgattgaatgaaatgagataatataagtaaattacttccagtagtccctagcacataagcactcattaaatgttagcttttaaaattgtattccagattaacatgcctaaaaactagggctacgtactgagaattcatagaaccaattttactttgtgtctgtgttcttatgcctgcatcaggcattacgaagaatacagagagacaaactttctattcctcagggttgacaatagaagagaaataataatacacaggaaataagtaaaagtataattcaaactccaagtttaatgatgtataaaatgaagaggtcagtttgggctataacaatcagataagattcactaggtgctaaactcgatctaaactgagaaaaatagacaagacttataaatattagtttaaaacataaatctgaaagtgttactcccctatattttagtaagacttctctgtggcccttgctcctataacagtttctttaaggttaaaactgctgggtttctgagctcttctccatcctactaaatgagaacctctaatacaagaggacagtgcttggaaatctacatttgtatagaacccaagtgattcttatcaagcaaataatggaaattctatcttagagaagtctaaacatactaaggcccttgtttagactctatgtaatttcattttcagccactctgggccttgacccctgagaaccagcaaaagagaactttcttcagcacttggcttagccctcccctcttttgtgaaggagtttcccttcactggtcagtgttccttgtctttaatgatggtcttgaacaccactatgttgttgtacttaaaacacagagttgtaactgtttacaggtttatatccattaaaccacttgatcttgtgtttcatgctctcttattctcaccttagcatttagttaccactcactaaatcagttgatcttgaaactttagaaatcttacccttacctgaggggtccttgtttacaaagcagatttctagatgctcttgctcaggtactcttattctgtagttgaaatgggcattttagggccagacactttggctcatacctataataccaacactttgggaagctaaggcaggaagatcacttgagtccaggagttcaagacaggcctgggcagcatagcaagaccctctctctacataattagcctggcatgatagcacatacctggctactcaggagactgaggtgggaggattgcttgaacccagcattttaaggctgcagcgggccacaatcatgccactgcactccagcctgggcaacagagcaagatcccatctcttaaaaaaagtgagcattttaacaagtgtgtaaatagtctaccattctcttaaaacacacacaaacatacacaccttgaaaatgcaaatgaatgaatgtgtgacagagtggaagaaacagcttcagaagggagaataaacatagcatttacagaagatagtgagaataccactgatttggtatgttggatgctggttgggagaattttatgggaaaaataccagttgagtgaaattatggatgttcttgagaaatagcagagtttgaattgaatgtggctttttgcataaagtggtaattttggaattttggaataggagaatgaataaagatggcatccccaatagttgtcatggctagtcttaggaagggttggatcagatgatctctaaaatatctcttaacactgaaatgtatagtgttatgctataaaatatgtagatattgagttgtattaataaagccttagcttgtattcatgggataaaacttctacttaaataatattgtaatttcattcattaatgcatgtgtataaaagtggatcagtattgtggaaggtttgcttaaggtgagatacatgcaatggtagcctggagccaggtagtagtaccagctcaggagtactaactgttacgtattcaatgattttgagacctggttggaaagcacaggcattattaaattatataaacccgtaattaaataaattatatgaaatgcaaaggtaatcaatactcaaaactcattagttcccaagtacttcattatattttactattatccatgctcttgaggttatgtagtccatcgtatctgtgtcgtggaaatactatataatgaggtgcagctacaaatctcttcccaactccacattcagggccatcacattggtagcttgaaataagacatgctgatagtagttacaccatggaaatggacatactgcacaaatcaggcctttttttttctcctggagagccaactgataaatatttaccagcataccaatggctcatgtttagaatagtcccattgttttggggtagaaattcattttggtacatggcctgactcaaaagttcacccctttagtgttacctcctgttcagcattgaagccacttatgtctccttatatgaaaccagaaacaagaggctttttttttttttaattctaagagtggctggctttagttgtaacagaagagagcaggtacctttattgtacttcaatttaaactcctttcaaaaggatctgagaactttttcaaaaaaaatttattcccccaaatctgataaatatgcctctattttacaatcttttacaacttttcaaattactacaatctgaaagacattttcaatctttcttgaaagacagggagaatattgccatggatgaagaaaacaatgacttgtttctttcattgtataaaatcattcttcatcactgtgaaaataagaaaatgaattttttttagttgagcacaatctcgagatctttctaacagcctctgttcttacagtatggatgttactcttggtttatagctctgcaaaggagtcaaagaatcttccttttatgagggccctgaagaaagaaaattgtgctgataaaattactttatgtgcgtttgaatgatgatatggccaagcattcttcagaaacttctgaatttttcatgtatgccttcaagagttgtaatccttacttaagcaaatgtctgtttaggagagattccagagattttcctatttagagtgttttaaaaattaaggaaggtgttcaccagcttactagaggttccttgtgaaaagagaaatgagttttcttcaacagtcttatgtctttggttcaagctgacataattaaggtgtaaacatatcagtatagtttgttttgattaaactttagatggacatagaataggtaatcaaattcattggatcgaaataagtattcttactctgaaatgaaacaaaatggaatcttcagaaacatggaaacaatgacccaaacatcagagaggcattgaagataaatgggaatatcactgggaatagtgtaattggagcagtgttttccaagcccaatcctcagacctctcgaaaatggagattgtaacactagattgtgggcagtctataccaaaccaacagtactgaatcagagtgggttatgggaatggctagagcatttgcaattttacagcatattcagaagatttttatgtacactgaagttgagacgtgctgatttagcaaaggtaactgacaatttgcctcaattccctcatctgcaaaatggggattataaaagtagggttgttggaggactgaatgagtacatatatgtatagtgtttaggacaatgtctgctgttttacagtaagtgctctattgttggctcttgccactattattgttttgtcaagggcttgtctgtgctagctggaatggaaacttaaatgtttctaattattgcaactgtcagatttcttaaatatcgtaatgaagccagcacagtgaagagctgtcctcagtttaatgtaacattggatctatcctaataatttttcttagtttcctattgcatttgtaactattttatttaaatgttttatttttccacagggttacatttattttattacttcagaaatattagatgtcattctgaaattgtggctgtgcctttatcttgcatgtggaattcaattttttatattctttacaaacagtatttataagaaataaagataaggttacagtgagttgtagtatgagatggtaatttacatggggtgctccatgtgcttagcttttctctgaagttatgcatccccacagcaagggaaatatttgcatttctgagagtgagaatttatgttcatcctctactaggaatggtggcagcttttccaggtcaaggccctgcagatgcctgatggtcatggtaaatgaaggctggatgcagggaaggcagcaaaatgagaaaatctcctgggatcaattaatgggagtcatctgagagagaataaaggcaggagaacattttcttctagtcaggaattcgcatcagttttgcctggtaatgggtttcatgaaagccaagatgaaagggttttatccctaaggaaaaaagggctctcctcacatcctctttctgtgctcttttatcaatgactaataataacatgcttgcatccatgacaatctttcagaaaactgatgcaaaaacaagtccaaaattagagtgtacagctgtcgtgatttcctggagtttctggtgtgtgcttagtaggcacacagtttgagttacatggcttcattatatgattacacactactttgttgcctcattggtggttaaggtgattttaaacttttcagtacccaaaagcagtgtcctggaacataccaatgaagacggagaattgtttcagtcccagagatatcccaagcaaatacagcagtgaactcaatggatatttgtgaaatgaataaataaatgaatgaatgagtactactgtgaatattcttgtcatgtttgcttgttctcatttggagagtttctttgaggtccgtgaccagaggttgaattgctggatcttaaagtaagaggattaccaacttccctatacgatgctcaattcctctccacaatggctatactagtttactgtctggcaatcggtgtatgagggttacctgtttatcacattgttgtaacatttgattttgtcagatgtcaggttctaactgaggtccaaggggagttggtgggcaagtggcgggtagctggaaaaacacgtgaggaactgtagacagtttcaacatggatttactctctctctggccatgagccatgagcgcaagatgtatgtacagcgtcagcagcgtagttgtaccttttacagacaatagtggctccaagccaagcacaagcttacatgggtgatcacctaatgtgcctcacgtggcgtggttacataatgtgcagagttgtgagcctgtgctccaaactcactgagtcatgctggaccggatgtctgcttcggcctatttttgagagcagcacatccattttccttacactccaccctcaatgccaaaggagacacaggccttggacacacaggtctaagacacaggccttatacgtacactctggggacaaaggccctggacacacaggtctgacacataggccttaaattctactccctaggctgaaggagtcttttaaatggagaaacatgcccacagggtggaaccccagacccagaggccacagcagtaatacaaggagcaacaactccaggttatgacgggcaaacaccccatgatgatgttacccgaatttactttatgcattaagccaggtttttatttccctacctttaggggcattggggcatgcaacaacaggttaccatccgtttccatcctggtcataggaggtcatccttcctcccataggtcttgccacatggcctagccccacatgggccagtggccaactagccacttctgtattttccaggtgcctaaccacaaggttaagcctcgatagaccacacagctattggtgcagattatcatatgtgtcacctctttggtgatcaccattcatattgctctgacttcagcccattgactactttgtccatacccggtatgaaaccatatggagtcagtactaggctggactgtgagcagtccaggcagtagcagcaccccagctagacccatctgtgtaccgtgccccatcgggcatagggggggatgcccttccttaaatggtgaaggctcagcatgtaggggtgcttcaggccccatgtccttaggccccatggccttatcttgcattaggactgctggtctcaagacctcttgcaactctgctgctaagggacttgtactcagcgtactctgttgcttcaagtaggtgccccactttgctaaagtggatgtctgcactgtcccagtccggggggttgttatcaatgaacacatccatcctgctatcaggtaactcgtctacacgacaactgtagcctgtcctgccatgctctcatgagcccgaagggcagcatatgcagttactaactgcttctctatcagtgaatactggagctcagcttctttccatagttgggaccaaaagcctactggtgttctcaagcactccatgctctgccacaggccccagccaaaaccatctgtggtcacatgcacatccaactcaaatgagcacccttggtcaactacccatagggcttgtgcctgctgaatagcctatttagctgccaggaagtcagtctcagccacactatcttaattctaggcaagaggagcattgccgcttctaaatctgcaagagaatcagaggttaacataatattatcaataagaccatgacatatgatggggctatgcatatatccctgcagcaacactatgaaagtccactgtcaccttcccgtgaaggcgaactgttcctggctctctagagcaatgttaattgaaaatgcattaatcaagtccaccacatagtggcactgtccaaattccatcatcaagcggtccatcaaatctgtaatagatgggatggctgtcaggccatgtaaaacatccacccccagaatatatcagcgctggtgtttaccagtgccagcacttgctgtatgttggtggaggaccagtggattgctaatttcacatgtggcctctatttgtctggtgtccccccaggccaggcacctcagccagttccctaatcaaacagaaaaagctcaacatttccacctggctgcagcaagtagtctttgagttgaagcacctgagtgggaccaggtcatacagcaatgtcctccttccccttctgcatttcctggaattgctgctcttgagacagttatctccacaaagttaaragtacttcattgggctgcttatcgattttctctcagtcaaccctggccaaagtcaaatctatccacatctgtgagtgggtcacttgttggggcccccttttcttccatgatggggaggctctgcaggtggggcatcttccccttttttacagtgcagacccagaccaagcaggggtctctggctgagatgacggacccaggcctgcattcacaacagcctctaactccctttccaaccctatgccaggccttcaggcaccccacctgcacctggagatccccattcatggcagcctctaactctttttctaagctgtgtagctgggcctccaggcaccctgcctgtgcccaaaaggccctttcctgcactgcatccctcagggattgggagtgtacttcttgtagcacagaaaaaatgcccatccaactctgctgtcaaaggctcattccttctcggtgctctgcacttccagctgcttcagtgctttctccgtgctcgtggggtacccatctactgctggccaggtttccaacagagttcacccttgcagcacagctgtgaccaggtaccacaacccatgtcgtggccacattgccaacccagaatcagcagggaccaaaggctcgcccaccttgggatcctgttcgtgatgccaattgtcaggttctaactgaggtctgaggggagtcagtgggtgagtggtgggtagctggaaaaacactagaggaatcatgcacagtttcaacgtgcctttactgtctgagtgtgagccgtaggtgcaaaccataggtacagtgtcagtccggtagttataccttttacagacaatagtggctctgagccagttacaagctcatgtgggtgatcacctaatgcgccttacgtggtgtagttacataatgtgcagaattgtgcacctgcactccaaacttgctgagtcatgctggacctgatgtctgcctcagcctattgactgcagcgcatacattttccttaaatcagatttttaaaatttttgcctgtcagatgaggtatgtctgtcactattgttttaattattttttcctaattgctagcaaagttgcctatcttctcaaatgttcacttattgttttttttcctgtgagttcttgcatccagtttgaacagtactatttaactttgttttaatgctgtcaaattcctaaaatagttgcttatgtcacagaagttctaacctcagaatgatgatatccatgccaaagcagttgaaatttaaattcttagataagtaactttaaatattccagtgttatagtaaaacatttatactggactattcactcaaaaattctttaaacagttgtcaaccttatttatttcattataataattgtaactttaaatgtgagatatgataaccacatctctgaaatgtgacaaccttgtccaccaatgttattatgcctgaaacataaatcttgggcccctgctcagaacctttgccttctagtttcagtaattatgaaattaattttgtgtttggtgttttgcaaattaaacttaccctattaaccctatagcgtatatacattatagatmtattattataattattatatttttaaaaatagctttatgctcattgggcagaatctgtatcagcacattttttggcagaatagattcagtagactaataactctgttataaatccctggtagcaatgttgggtaaattcagtggactaataaatctgttataaatccctggtaacaatggtggggttttaatgagtaacataaagaacttagaataaaacaacttaaatatatatatatatatatatatatatatgaataatattaacctttattcttatatttgtataatgtagttatctgatttgcagagggagagaaagagacagacaaatggatagacagacagaacgagatcatttagaccataaggttagaaaaatattatgagactatggaaaggtaatgaatatggtagagagagatggagctgaagattataattctttacttatggactgctccaggataactttgtttgatgttattttagccttctgatatcagtttatatactctaaaacgagtagaaaagaagcatcagtttgtataaatattctatttaaatattgtcaaagcaggtccatgcatcagaagtcaaattaaaactcactggggaaaactttgaaaaggcctgaaggaaatgtacttgatttttataatgtaattggcaaaggaaattgtagtcaaatatgagagctaatgaaagagtgaatggataagtaaaatccacaaataagcacaaatgtcattgggctgtttccctttccttaccaaagaaaatttcatgagagttgctaatgaataagatctgaacattatataacctttataagcattttcctcaaccatttttttctggttgagatgtcaacaagaagtaatatatcataatatacaaaagaagatgcatagtgtattaataatatgctaccaattaaaaatcgctggaataatttggcattggaaatgatgaaggcataaagagcagatcttgtattagacaaaaactaggaagttatagttaggttgtagtaaatgatgaacaatccattttgattgtgattcccaactagcttttaggcagagcctcaaccacagaaactcaatcctagtggataaaaaatatgcagacaatttgaagggagtgaagagagcagaagaaagtatgatgaaagaattgaaagattatgcaacagaggagtatttacagcctggctagataaatgaatggatatattattttttttaatttttttagctaatttacattgttaatttttatttaactattatttttaaaagaagataaatactgcagtggaaagagacttaagggattatactaagggcaattatgagaactcttgggacaaaataatggtcttatatcaacaaaaattccctggaagtgtgatatgtcagcttgcagaaaattttcccaatgtagtgataagaattctctgaagacataggcagattgaaaagacatgaataagaaacaatgtgagatacatttccatacttactgcagaggtaaagcagaatggaatttgtatcttttcctctgcaggtcctattagagaagacaatagagaaccctctaagaggtgattgtcaaattggttaatatgctgtggtttggagtgcctgcattgtgaacaagggcacattcattcaactttccacatcttcctttccctgtaaaatgtacatggagttatggtaccttattaggctattgttagtatcacatataaaaccatgtaaaattcctaccttatgcctggttcagtcagtgctcctcaggtggtagctattggttaaccctattctttataacataattgaaattaggttatatgacttttaaatatccaaacagtcagaatagaaatattgatgagaaattttgcttcatctcaaaaacagtgttagaactacaccaatggagtatttttctcctaaaaggttaatcaggatatgacatttataggatttacaatcacaatcctgataactgtgaaatataatatcagactgtttcttactattttatttttaacattgacattaagttaaataatatattttgttactgtagcctaggattttattttccctgttatgagaacaaggataattattttacaaatgaaattttaagggattagagtgccatagacatgctcattgcattattaatgtgcagaatactggagttctgccatcttcatgaatccccacattacattttggataaagaataagttctgtatataaatgtaggcttcagaagcttttgttgattctttcaccatattttatacaaaggctttcttgctttcctgcctctcatgctaagtacaggcccttcctgtactttcggctaaacgagatggcctttcatgtataaaactcagctgaaaaattgacttcttcataaaaccattcctgtttcatccctgactcaaggtcctgacttgaattcttccgacttccctgggcactgagccagcatagttctggttcgttgtwtaattgtttatatccttgtagcatattcagatgcacatagtcaccatgtctcacccagaatcagaatctctcaaggaaagaaagcatgtcctctctttccctaataatccccaaagctctcaataccatgctgtgcccacagaagggaatcagttaaatctgctgcaattgattggaaacttcttttcccccagattttccttaggtggtctcctgcagagttctgtctaaagtaatggagacttgggatttgtattctcattatgctaatggttattacttcctttatttttgaaaactggttgtaggatctaagctaaccatgctattttctgcataccacccagcgattctcatttagcaactgccttcaaatcgtctactccctttggtctcctcctcccctcagtaggagaaggatgagaggaagttggaatatttacactgagatgagatccttgagcacttgagccctgaggctgcctctggactaacgtttctgttcagctgtccccaggtttttcaacaagagctgtcagaaacaagtttgtgactaaagagcagcttcatctgtaacttctgtttcttgctactccctgctgtgtttctggctatctggaagcttctcagcagggtagcaagttgttggcgccactaacacctttcctctttcaaattcatattcttccttgggaggtgagtttgcatttcagaaaattctattttagtgaaaccacccaggaatcagtgtcagttggctttcagctgtgaaataactgcagagactttgttacagctaagggggtgcgattcttttggagagtttagattttctgtttatagagaagagttcttaggaattttatgcttagctgaaagtattaaacacttttccttatttcctcaacatgaattctttttcccggggctgcaggggaaagggctctgatcctggttcagtctctagcttgatcattttagtcgagttcctttacttccatgcaactctgtttcctcaagtataaaactattagttgagtgggtagaagaagtagatgatctttaaagcactttttaagtctaaaatgttatgattctgctatcaaattcacagcttctcaacatcagataagggttggcatgagtgttgctgaaaatatatttgggttggaggaagggatatcctcgattaaaaaaaaaaaaaaagccagatgagaaattaagacttttcagccaatgctattgacataaactcagggtgactttcacgtcctaagtagaagtggaacgttcattaattaaagcttaggtaatacctctttatcaaaattaataatttatgttcaaattaatcatcatgaattgacatagctaatttgacccttcatggttatcagagtctttttggtgaatatcatagtctacattaattgaaagaggataaggtacataggtgtcctctcccacaactaagccatcatgtctaatgtagtaatgaaagcagattttggactgaattttgttgactggcaagcttttgttaccaaggagccacaactatcataaagcctattctcataagctccatagactcccagctttctgtcccttagacattgtgataagcgtcttacatggaagatcattttttattatgtctgtttgattcttctctctttcttccttattagtctagctagtagtctatctattaattttttcaaaaaatcagctcctgtattccttgatttttcaaagggcttttcatgtctatctccttcagttctgttctggatcttgtcttctactagctgtggggtttgtttgagaggacatgaacagacacttctcaaaagaagacattcatgcagccaacaaacatgaaaaaaaagctcaacatcactgatcatttgagaaatgcaaatcaaaaccacaatgagataccatctcacaccagtcagaatggccattattaaatagtcaagaaacaacagatgctggtgaggttgtggagaagtaggaacgcttttacactgctggtgggaatgtaaattagttcaaccattatggaagactgtatggcgattcctcaaagatctagaaccagaaataggatttgacccaacaatcacattactgagtatatactcaaaggaatataaatcattctgttacaaagatacatacacaggtatgttcattacagcactattcacaatagcaaggcatggaatcaacccaaatgcccatcaatgatagactggttgaagaaaatgtggtacatacacaccatgggataccatgcagccataaaaaggaatgagataatgtcctttgcagggacgtggatgaatgttctcacttataaatgggagctgaacaatgagatcacatggacacagggaggggaacaacacacactggggcctgtcagggagtggggtttagtgagggaaagtattaggaaaagtagctaatgcatgctggtcttaatacctaggtgatgggttgataggttcagcaaccactgtggcacacatctacctatgtaacaaacctgtgcatcccgtgcatgtaccccagaaccaaaaacaaaaaaaataaaaacctaaaaaaaatcttatttcaaaaacaggctatgggctagatgtggcctgagggccatagtttgttaaggcctgggactagaccaacatatgcatgtgaccatcttgtggatgagtttccacaagactgagagctccataaaggcagagactgtattttctcattttttattcccctcagtgccaagaaaaacagtaattcaataaatgtttgttgcattaaagaatttattcacgaagagttataaaaatcaatccactgtttttccatttgctatctctgaacatgtactatgtcatttttacttgaagatatttatattgaaatctctggttagtgatgtctcacttctgtgtacagctaagaagacgtacagtttttaaaataatgttactaactgtaacaaaaactattttatcaagaaatataaaagaaattctttaacaaggttgagaggttacttcatgcattaagtttctgctatcttgctgatgttctgctataaaaccttacagacactatgtctgtattactggtttcatttgaaattttgccttatgattaatctaatttggtttcattgtccataataaaaagcaattgagcatcactgatgtgsataccattttctttaggttttaagaaaaccactctaatattttttcagggccattattttatcaaatatgtatatatgtgtgcataaggagarggagctcggaaaaggatttatatttccttatagtcaattttatgttctttctaccctaccactagctccaccatattgaaaatatctctataaatatgggttatgtcctataagcaaaggatacattctagaattcatttctctctaaaccatgaagcatcatccttaagcaagatgctaaacctgaaacctctgtagagcacatttgggtagacttatgttctcattcttgcctagaagagagatatttctagttttcttatttgctaaccttataatttgagcacagaatgtcagatttgtttcagcccttcgatttaatcacatcatgtctgatatcctagcatttaattacccaaattcccagtgttgttcaagaaggtaggtctgtggtgggttagccttaagctagtggctgaaaaggtcttgatttgcccccacatctaacctagtcacttcctgagctgaaactcccatatcacctggggacaagcgaccctgaaatcctcactggccacagcttcttctgagggaagctgcaggaaaaagaacaaaaatgagcttttgtgaaaggattaacttgggtgaagaacatcctccataaccaaataaatggaacctagtaacccacatggccaatccccagggcactagtgtctttggggatatcagggtgtgtatagaatttcgtttttgtcattcttgaaaacataaaawaatctctgaaagagtactagtggtcaaggtactagtctagagatggaccaaacaatcatattaaacctaatttaatctccagaatttatattttgagattggtagcactactatcttcattttgtactttccccaacttcctgcagctaggattcaaatacagaccatctaactccagagcactgccctttaacattgtgctataatccaccactttgcatagttgatcctacaagaggataagtagagatcaaagtaagaagtgatcaatggattactatgtcaagcatgattccctcaaactattgggaagaataaataccataacatgtatagggtgctgtgtacaattcctggcacaaagttaagtacatgataaaatggaactattaatattagtaacccagataggttctgggcacattagcaggaaaggtcttcttaatttaagtaaggtgctaaaagcatctaattttattaggattgttatgaaacaaaaactaaatgtgcaagaaaatatatttaccgtagcctggggaaaattgtcatggtttctcttttcaaagaattcaatttggtaagaaacagccttcaatggtccatgaaaagtgagaagtgtagggaataagaggctctttcctatgtttgcatttcaggcttgccttcttacttttaaatttatctttacaattgccttcctgctgggtttgtgtcttcctcagtttagggaaggtgacaagaaaagtcctgtttgtgtgtaattgacatgaaaaatggtaggcttttaactcaaggaggctccagacaacagtttggttattaaggaaggggaggacctaggggaacaattgtttctggcctctcttcttctcaggcctggaacaatctttcatttactatattcttgccacaagagcacagtcaatattaaattccaaaaaaagaaaaatccctcacagaaacagctgtgttcaatatacagccagtttactctggcgaattgctagacatggaacagttttcatttctttttgtgtttatccctgatagttgtcttgtaaaatctgccttttgtaaataagggaaggctggttttaaacagctttgactaatattggtagttggagtattcagtattacagagttttagagaactaaaataaacctgatggaaacacacacatatttcaaaggaaacattttaaggtgttctggttccattttttccattttgtatgtaagttggattatgatacttttatgtctacattgtctcttagtcaaaaatgtgagagacgccattcaagtctagacttggaccctactgaatgccttgttcatggacaccacacaatctcgatgtaaatgtttattgctgatctgtacaaaaaggggaaaagtagttttttgaacaacagaaaataccagttaatctcactggattcaggaattatagcaaagcaatccaataagtggattctctgagagtaggaactcaagtgtgttatctcagtttttatccagtttccagcacaatgctggcaccatttaaattctcagtcaatgctggagaattgaaaaagaatcctcaaaatttggatgacaaaatgacaaaggtgtcccctgatacagaaatctgtccatggcagaaagattagtgatttgagatatggtgtcatcattgtagatgatggtgtcccattaagcatgttttcactaattacaataaatgttgaaagaaggagtttcacctagtatccttactaatatcagggaatggcctgggctttggggagatgagagtcctctgctttcagtttaataaagtaggatatttgtgtttttgtttatattgttaaatacgacgggttagcttgtcacctacataatattgtgtggcataaataaaggtgaattcccaaatatgtgctccatagtgttgacaatgagtaaatgttcattctaataattgtaagggttacctccctcgcactccttgaaaatatctttttattcaaatttttcgagctggaggtcatgtgttacatttcctgttgtgtaacatggcctccctctctttctctgtctcactttctcactttctccctctttcttttactctctctgcctctacctctgactccttctccttcttcccagctttgcatcagagccatgtaactgacattttcttggttccctcaggacctgtcataatagcaggcaaatattagatgatgattcaatgtttaatgaatttttcttgaatgtatgtatgttgcttcaagtcattcatgcacacattgaagaggacagacagagccctgctgaacaccactagcaaatctctctctagtagaccacaacaagtcaatctgtgctctttgattacagttgttcaaccagttactaatctaactaattgtaactggttgaacaactgaacccaaagggtgcaaagtagaaacatttcattgtgaagtcggctggggacaaagaaaacaccaccagaacccccttcaatatgcaaagggaaaattccttctcaagtacaagctacatggtgcctttttgaattatcatcaatttgtaatgctgtatcaatacatatgtattatctgttcttttggtaagggttgtttgaagtataaggtacttcctccattaaggtgatactaaccacatgttaattattgtctgaaagtcaccaaggatatgaataataaaaagttttaaaaataagacctgtttcttttattgatagttgtacctcaaggctgaagtgaggtttgcaatgtaagttgtaaaatgtgatgtgaaatagacaattctttgtagtttatataaggcaatatatccatgtgcaattatggtcaaaaacagcagacttttaagtgattattctaaagttatttttttccaaaataactttattactcttgatatcataccatattcacaaaacattctggtaaagctattgctcagtgtgttgtcccagtgagactcagggaacatttctatgtgacgctttaggattgaagacagttccacgttttctgagtaattccaaactgtgtaagagattatgttccctttgcatattggctgctaagaagctcactttttcacttatgatacttggatgcattttggctttttgggtttttgttttttggtctaattttttttttttttttttttttttttgagacagggtctcactctgttgcccaggctggagtgcagtggcaccatcatggctcactgcaaccttgacctctcctggctcaggtgatcctcccacctcagcctctcaagtagctggaattacaggcatgtgccacaacacccagctaatttttgtattttttgtagagatgaggtttcgccatgttgcccaggctggtcacaaattcctggactcaagccatcttcctgccttggcctcccaaagtgcgggcattacaggtattagaggtaggagctactgcatctggccatgggaaacattttgaatgataactttgtttgtttgttgtctgttgagcaggctggagtgcagttgcatgatcacggctcactgaactctttcctttaatttttttattctctcagcacgattataatttattttaaaagtagggaataattggccaggcgcagtggctcacacctgtaatcccagcactttgggaggcygaggcaggcagatcacaaggtcaggagatcgagaccatcctggctaatatggtgtgaaaccccgtctctactaaaaaatacaaaaaattagccgggtgtggtggtgggcacctgtagtcccagctgcttgagaggctgaggcaggagaatgacgtgaacctgggagggggagcttgcagtgagcccagattgtgccattgcactccagcctgggcgacagagtgagacttcatctcaaaaaaagaaaagcagggaataattagtaagtgcctaactaatcaaaaattgtttccaggtgatgttgctgttgatgtatgaaaacctctttcacctagcttccctcttcattcttttctgtcatatttctattgaccagtgctttcttggcccttggaaatgtgattaacttttgccatgacctctatgttagtgccacacctgacacctttatgccactctctgcctccagaactctgtgtccatcttatatgtttttaccttctgctgggcctcaggtctggatgcaaagctgtagaggaattgagctgtttttcacaagggatccaagaacacatagcatgtgtgaactgtactaaagctttgagaagttgtgaagaagattcacatcaactatgcaccacacagccttcttgtcttgctggtaccatctcctcacctctgtgttgctcctcttggagtcttcaccttccacaaccagcacttctattctcactgtctgagtgtgactttccataattgtgaaactccttgggcttatccctcacactcattcttgaattctaaggaatggcattttctccattgtgcttacatttgcttttcagtattaattgttctagagaaaagcattcattcactcactcactcattcactcatttaacaaaacctgtatgggtatctacagtactatgttctaggtatactgaagacactaacataaataatacaaataataaccttttctcagggaatttagattaaagtagttcaaattggagcaggggaagcaaatatttacgtagattatcagggaaaatgtgtagtgagtgccgtgattagcactatgcagaagattttatgggagtggcaaaaagcagaacctaaccttttctggggtgaaaagtgtgacctaaactgagtcttaaagaatgaatgtagggtggagagaggaatrggaagagcatttcagggagagaggaatagcaggaacagagacactgatgcaaggaatcccatggtatttgtgatgaagggatgatttagtagttcagtgacaagacatgagcctggagataaataaggtttaggttctggggaccttgtgagccaggttaaggactttgggttcatcctcaaaccatgaagcattccaagcaattatgtgacaagatcagattctaggggctgaatggagaataaatatgtaagtggcaagattgaaggctgggaatgtaaaaggtggctcctgctgtggcttgggcaaaacatcacataggcttgagctagctttgtgattctacgggattgagaggagaatgctaatttcataaatgtttagtggatatgattggcatgtgawctgaatgcaactggagaaggggaccagtcatttactgagtwgatattggtaattgataaataagaccaaagaaggtgaggtttggggataggcagtgtaaattttggaagtaataaggggattgaggttctgtccatggcattggtggggaaatctagcatgtaaatacatgtaaatagataagtaaatatgcctatacatttatataagatatctatacacttattctccttctttgttcatttattaggtgtgaaatctacgtgatttttttctcccatattatttttggtattcaataaatgtgaatcatgaagagatagctgttttatttaatctctgcaaagtcacattcttacccattttgattgtaataaaaggcctatgtcgttatttaattttttaacctttgtggcatgatttatagaaggaaaataaaagtgtcataggtatgataggccaaagttgggttgttggtaaaataataataccacaaaatgtttttctatttagccaactactgcaaagttactttaattgtgtttgcaattaattgatttcactttaaaccagaaacaatagagactgtaatcacacagccctgcagttctgaatgttttgttcttccttttattggttttctagatattcctagttggcaacaggatagagttcagtaatggttatgcaatttcattgtgcagggtattaaaatttgtgaccagggatcccaggagaccagctattagattttcaatgcactattagattaaatmtatctactcaaactaaagggatcctgcctgaggctgtctgatcaatagtctatcattcctgtgcaaatgaagctattaagattctcttaggaggtagactatctaaattggatctaactagtagatggtgactgaaatgagggatatactgatacttaattggcatcaatctgaccttgataagattttgaaaaaataaatacctttttgctacaggttgaaaaagaggtgtaaaatagtccctattttatattattggttcttaagtacttatcagaaaaatgacaaaagtcagtgtccataaacaaaggttccattgatctttgatcaccaaatcatcatttctatcttcctcttttttgtttaggtcactgcagtcaccattacctccaccaccatcataattatatatagctaccacttcttggacactcaggtctgcttgtgtttgaaccagacatttctagctccaaagcctgcattcttaatttcctgcagtcttaataccatctttttaatagaagacccccacaggaaaagctgattctataatttaaaaatgatttggggatccaataagtcatgattctattttatataattttggaagatgtggccagagagctaactctttttattttattatttttcttttaattgttgacgtacttataaccaccagctatgaagctataatttattgccacattgagtatgttaaattgttaatttacataatttctgattcttatttctcccctctcaaattcaatttgataatttaacatacctgcttctgtgtgttccatggaactattaatataattttttaacagaattatgagagaattacatttccccagctgtagatcaattgagaaacagtagaaatgaaaaggttaagaaattctgcttcaaaatctcaaatggtcaaagtcattgacattgtaagctcttctgttcgactcaagcctggtggaaaatgtaatgaagaggtacaaagtacactgcataatccagcaagctaattgcccactttaaggcctcttgagcccaatggccaagtgaaacctccactctcagggaaattaggcaactgctaaggtggttttgcagttttcagagacacagagattaggtttttcagccttatatagatctgtgatcactaatgatagtctgtgctaatgaaggtagttttttgaatcaaatgcatattgacttaggtcttcagcgcagaatgttgattcactgctgtcatccctgtcaagagagctgcatatgtaattatggttttcttytgaatagatttgctttgggactgtcacgcaaattccatttcttcatgttcttgctatctttcaacctcaaataaataaataaatagaaaaaatatctctaagcactatgtgtgggctgtcattctttttacatttagtgttctaatgtttttaaacaagtcagtttacaggtaaagtttgctgtaataggattgaatgtgggtgtatgtggtggtgcttcagatctctttccttctgcttgacccttcatgttgggtaatagttttaaagcgctcatgccagaaagtaaaccacaacatagtcaacttctcaaatatccatgcaatgtagaaagtccggggtcaagatgattactatgtgatctgcttaagtgggaacagggccatttccctcgccttcaacacactcagatacatctcagccaaccaacattttgctgtttgaaaaacatggcagactttatcttgtccctaaagagaatgcttttctccatccctctgcttaatatcctgtggctccatttaacctccaagccaaagtccagtttcttttagaagacttcaggcaaaattaggagcctcttatagtgggatgaatgctttctatactgtttttgtaatatttttgtaacatttgccatattaaactccatttattttatgggtctgaatcttcactagactaaactgcttgagagaggagcatgtataattcattttcatgttcacaatgctgaaactgatgtctatagagcttcagtatttgtccactgcataaaatcagtaaataaaggcaggaaagtttgttacatcaagtaggaccaagggctagatccattgggacaattcaacagggcttttcattggttattctagctgatatcaacctgccctgacctgaatcaactctgagcccctacctaggctgttgtttcttagcaagtacataataacaactcatcagaatagcagagatcttggtaacaggttgcctgacacttgactgatatgggaaaatcctgaacaggtttggactggaatcttggctcacaacctgtgtgaccttggtcaagatattttatctctctgagcctcaattttctcttctgttaaatgagcatagtgaaactttgttcattggtttgctttgaagagtaaatgagatggtaagtgttggtgtatgtagtgcaggaacataacaattcttgatagatattcattgaatacctrtagtacatagaacatagaaagttcctgttattccactcccacccccacacacttgcccttcaggtctcaggttctccttcctggtacccccagaaagattaagcccctttggccctctatgtgcctcttttatagcatttaacacaattataattaattgattatgtaacttttttatttaatagctgtctcttgtagaatataagcacataaattcagggactatctattaatgaattttcctctagtgcctagtacttaggtggctcacagtaaatgctgattcaatggatgaataactttattcagtctgctcagtgtggcctttaatttagattcaccccaaattactccccatcaggaaggctttcttattcaactttctcatcctcaagattagcaaaactactctctttctattcccaaatatcttctctcagtttcattaccatgatcagaaagtactcttccttgaatttattttctagactagatctattttggggttttcttaccagtgattgtaactattgatgtggtcttttttctgttttttacttctcatatgtgtatctctttccattagtccttcattccttcaacagatactttctgttgtgacagccactcttctaagcactatggaaggatttaaagctgtgtgaagcacagttattccggtcaaggaacttaaaaaaataatacaagtgacaaaacatgtgcaagtttgactaaagtatgagactggaataaataccttataaaaaccaagagcttcagtattttcctgcagttttttgctctattgtattctcaacttttactggtttctcatcaaataaatgtgttaaagtataactcagatcattgcttagatgtacttacttttccaacaaggccttccctgaacatcctatttaccattgcaaatgcattcctctccactagcgccattcttaccctctctttccacatcaatgaatttcatagcacttgtcactttttttcatgctgtataatgtatattaagatattgcttattgtctgtctcccttcaatagaatgtaagctccatgtgggccaggatgtgtagtcattgatgtatccctagaataagtgcccaattatagtagtcatttgatggacatttattaaatgaaattatgaatgaagtagggattggcagttatacactaagactctggaaaaatggcctgagttgaatcctggctttaccattcttggctatataatctcatattatttactttcagcctttcatttcccagatgcccctaccttctagggttgttgggaggatggaatgcataatacatgtaaaccagcaagttcatagtaacaaaagttgactttttaaaaagttaacttactcttctttcctatatatgtgtaaatcatattttattttctcattttaaaaagaagacaataactaaaggtattagcacataatgattcaaaacataatatttccacatgtcgagttgaatgactttgagccagataatatgagttgaaatcagtttaacaataattaaatcagccaagagcagtgtctcatgcctgtaatctcagcactttgggaggctgaggcaggtggatcacttgagctcaggagtttgagaccagcctgagcaacgtggtgaaaccccatctctacaaaaaatacaacaacaaaaaattagccaggtgtggtggctcatgtctgtagtcccagctacttggggggctgaggcaggaggatcacttgagcccaggaggtcaaggctgcagcgaactgtgtttgtaccactgcacttcagcctggacgacacagaccatgtctcaaaaagaaaaaaaatagaataaaatcaaatacacaccatttttgaatatgtcaccagtctgtgtagttcatcttgaaaggacttcaaggtccaatatgcatcatgcagagagttgctagggcccagacaagagtgacttgaccattggcctgagtagttaaactatcagataactagtgaaacaattcggctatttcaacaaacatgttgcatacataacgtgttatgcacagagatgacatttggtataatattatggcaataaaaggtgcagttcctgccttggggaagcaattgtaatatactgtgaggagctaagagtaaagaaggggcccttgtaaatgaggggtgggtcagtagggtagcagttggcagaagactcacactggaataaatgctccttgactcgatattttttttttttcaaaaatgcagaagcattattgaagcccggatgtttgggttctatgataaataaaagatatggatttgagctgctcattaaattttgaaagaaaagatcctaaaaggttagagaccatggagatttcaaagtggctgaccttgattagatataagtgtaagtcagatgggtattcctggggggtcccgactttaatacaatttgaaagtttcatgattatgagcacctctctgtgcctccttggtggagagctgacctatgagtagttactgtgtgaattaatgaacatccttcagcaaaagttattaatagtaatgtttggtaaaagtcctttagaagtagactgttatgtgtgttactagttataatcaattaataacctgtgatttgtaggagcaaatggtcatagggatacagtatacattttaatcttgctcttcaaacatcaccgtagatccatggtccttctcaagacattggctttgttctgaagcagctcccacgctcttccagaaatctctatgcgggactctgaatgtggtcaagaagaagatgtactggatgcacattccctatcaggagtctcttaatagtctcccacccagttacaacatattgctgtaatcccacacaacagctgaaacatcttttcttcatttcttttaattcctgtagcatttgatgtctccaccgtgtaatttacatttaattgtaagttgttttgcatcatttaatagttgtttcaagtatgaatgtcttgccttcccaagaagattaaaataagattcctttaagaacagaggctcactgcgcagtgccagacatagacatagagtaaaccacaactactgacttcacttcaagctgacctaaccatcttcccagcgaagacggccaacctggtgtataactcattcttctgatctgcacttactttatagaggaataaatacactgagttattgggagtttgtgaaggaagtgactagaatttcaataaaataataaagttttgttttgtttcatttcgtttgaaaagaaactgctgcatggccaagatatttgaaaatggaggctgggattggacaggggtgaagaattgtgtcacagactttgtactggaaaaatgtctgccttaatctagtgaataaatatgactgttctttgaagtcctttttttcctccccgagtataaattcaaatgctattcattttctgagttgcctgtatttctttagcccttaaggcatcaacctttgatgtcttattttcataatattttctctcttagaactgatccacatattcagtagaatggaggtataaatcctaatccatagactactccgagcttattgaaagtgaatcttatttagattctttcctttatctgctcactgacagatctaatgttaaacagaaccttattatcatcacaaggaagtagattaaaaaatacttttcagtcattcgtattcaacaagtacactccatcaaatcttgcctaactttttttgcaaataactttgctccttggatcctctcccaggtctttatcaaaatggaaccacatacatttgtaactacctcataattaaagttttgagtcattaagttcarttatctttaagggtaaacattgaatttgctgtaaaagttccatttgtttcactaaaattygcaaatagttgtgattttctttgcagatctgtccagtttgatcttgaaacaaaactgcttaaaactttatcagccttccttctttttggcttagctttaataaccacttttaatatataactcagatctataaataatactgagaaaagcagtggaaaacattgcaggtataaagacttttcatgttgactatttttggtaaagattctggacatttgagtgaagtctctcatgttttattggtttattttactctggcaccgcttatgaaaaaggggacttgaattactagagggtaattttctttctttattttatttatatattttttactatttttttccttcagttatgttgtttattcaaaacttgaaaacatatacaatttcagggtcttctagagtatatttacatcattctgatgaacaactttataatttttaaattagcaaatattctcaaccctgtcagctttaatattataattaatgtgcacaaakctgaaaacttttcttgctcatactataatacattaaatagaccttagcaaacaacttcttatttgaatacttgtctgtccctgtcactcttctcatactttagcctcataactttggttataattatgtaaatggttaatattcatgttctcattgcaaaatgaaaagtgaggaagagaaattaagccatttgcctaaggtcacaagtctggtaaaatcaacagaggcactcagaatacctccaaaatcatttccatgatgccagaacctttaaatgctacagaaacaagctaaagcgatgcatttaaatgtgcttctatgtagggcttgagctgtatctaaacttaaattagagctcagccaacatagaatctagttcagcaatactctacaacatgagataaccatactgatgtttgatataaaatgagattgcagaggaaacacattttaatacctgaggtgtgtgcttaatcttcttgatgtatattaaaagctcagtacgtgagagtaatatgaggtgatggggtttactcttaaagagattactaataatgtttatttggaaaaagatgaagattttagaggctatttaagaaactggttctgggaaaaccagccataacttaagagttcttctttcacccaatccccttggaattctgctttgctatagaaccatggtcaaaccaaggcaagcagcacaaattacatgaacaaagaatacaacaataaaaagcggatccttaagaccctcccaagaagaccaagagctctctctttaaaactctgtaaaatacctaggttctcaagtcttcctatgtcttatttcttaactaattgcactatcaattcaaaaatggaacaaaggatattctacgtatcagaaccttttttcctatacattaagaagaacttttcccacatgaataggtaatatcacagtctaaagccagaggatgaaacctatgaattcttcctatcatatattttaacaagaaacgtaaatatctatgacctacttatagccaatttatattttgcccaggttgttttgtttctaaacttacccctcatatggcttaataatgaaggccataaatgtgcctctttcctatctcacccctatgacttgacatgtattataaaatgaacttcctatataaaataatatttattgaatgaaaggaaagtattacatacaactttcattattatattattaagcttattttttgcacatcatrgctagatcatcttaaaatagtttggctctgtctcttttcccattttttttttttattatactttaagttctagggtacgtgagcacaacgtgaaggttcgttacatatgtatacatgtgccatgttggtgtgctgcacccgttaacttgtcatttacattacgtatatctactaatgctatccctcccccctccccccactccatgacagaccccggtgtgtggtgttccccaccctgtgtccaagtgttctcattgttcaattcccacctatgattgagaacatgcagtgtttggttttctgtccttgcaatagtttgctcagaatgatggtttccagcttcatccatgtccctacaaaggacatgaactcatcattttttatggctgcatagtattccatggtgtatatgtgccacattttcttaatccagtctatcattgatggacatttgggttggttccaagtctttgctattgtgaatagtgctgcaataaacatacatgtgcatgtgtcttatagcagcatgatttataatcctttgggtatatacccagtaatgggatggctgggtcaaatagtatttctagttcaagatccttgaggaatcrccacactgtcttccacaatggttgaactagtttacagtcccaccaacagtgtaaaactgttcctatttctccacatcctctctagcacctgttgtttccttactttttaatgattgccattttaactggtgtgagatgatatctcattgtggttttgatttgcatttctctgatggccaagtgatgatgagcattttttcatgtgtctgttggctgcataaatgtcttcttttgagaagtgtctgttcatatcctttgcccactttttgatgtggttgtttgattttttcttgtaaatttgtttaagttatttgtagattctgtgtattagctctttctcagatgggtagattataaaaattttctcccattctgtaggttgcctgttcactccaatggtagtttcttctgctgtgcagaagctctttagtttaattagatctcatttgtcaattttggcttttgttgccattgcttttggtgttttagtcatgaagtccttgcctgtgcctatgtcctgaatggtattgcctaggttttcttgtagggtttttatggttttaggtctaacatttaagtttttaatccatcttgaattaatttttgtataaggtgtacggaagagatccagtttcagctttctacatgtggctagccagtatttccagcacaatttattaaatagggaatcctttccccatttcttrttgttgtcaggtttgtcaaagatcagatggttgaagatgtgtagtattatttctgagggctctattctgttccattagtctatatctctgttttggtaccagtaccatgctgttttggttactgtagccttgtagtatagtttgaagtcaggcagcgtgatgcctccagctttgttcttttggcttaggattgtcttggcaatgcgggctcttttttggttccacataaactttaaagtagtttttttccaattctgtgaagaaagtcattggtagcttgatggggatggcactgaatctataaattaccttgggcagtgtggccattttcatgatattgattcttcctatctatgagcatggaatgttcttccatttgtttgtgtcctcttttatttcrttgagcagtggtttgtaattctccttgaagaggtccttcacatcccttgtaagttggattcctaggtgttttattctctttgaagcaattgtgaattggagttcacttckgatttggctgtttgtctgttattggtgtataggaatgcttgtgatttttgcacattgattttgtatcctgagactttgctgaagttgcttatcagattaaggagattttgggctgagacgatggggttttctaaatatacaatcatgtcatctgcaaacagggagaatttgacttcctcttttcctaattgaataccctttatttctttctcctgcctgattgccctggccagaacttccaatactatgttgaataggagtggtgagaaagggcatccctgtcttgtgccaggtttcaaagggaatgcttctagcttttgcccattcagtatgatattggctgtgggtttgtcataaatagctcttattattttgagatacatcccatcaatrcctagtttattgagagtttttagcatgaagggttgttgaattttgtcaaasgccttttctgcatctattgagagaatcatgtggcttttgtctttggttctgtttatatgctggattacatttattgatttgcatatgttgaaccagccttgcatcccagggatgaagcccacttgatcatggtggataagctttttgatgtgctgctggcttcggtttgccagtattttattaaggatatttgcatcaatgttcatcagggatattggtctaaaattctctttttttgttgtgtctctgccaggctttggtatcaggataatgctggccttataaaatgagttagggaggattccctctttttctatcgattggaatagtttcagaaggaatgttaccagctcctttttgtatctctggtagaattcggctgtgaatccctctggtcctggactttttttggttggtaggctattaattattgcctcaatttcagagcctgttattggtctattgagggattcaacttcttcctggtttagtcttgggagggtgtatgtgtccaggaattcatccatttcttctagattttctagtttatttgcatagaggtgtttatagtattctctgatagtagtttgtatttctgtgggatcagtggtgatatcacctttatcattttttattgcgtctatttgattcttctccctttcttctttattagtcttgctagtggtccgtcaattttgttgatcttttcaaaataccagctcctggattcattgattttttgaagggtttttttgtgtctctatctccttcagttctgctctgatcttagttwtttcttgccttctgttagcttttgaatgcgtttgctcttgcttctctagttcttttaattgtgctgttagggtgtcaattttagatctttcctgctttctcttgtgggaatttagtgctataaatttccctctacacactgctttaaatatgtcccagagattctggtatgttgtgtctttgttctcattggtttcaaagaacatctttatttctgccttcatttcgttatgtacccagtagtcattcaggagcaggttgttcagtttccatgtagttgagcggttttgagtgagtttcttaatcctgaattctagtttgattgcactgtggtctgagagacagactgttgtaatttctgttctttaacatttgctgaggagtgctttacttccaactatatggtcaattttggaataagtgcaatgtgatgttgagaagaatgtatattctgttgatttgtggtggagagttctgtagatgtctattaggtccacttggtgcagagctgagttcaattcctggataaccttgttaactttctgtctcgttgatctatccgatgttgacagtggggtgttacagtctctctttattattgtgtgggagtctaagtctctttgtaagtctctaagggcttgctttatgaatctgggtgctcctgtattgggtgcatatatatttagratagttagctcttcttgttgaattgatccctttaccattacgtaatggccttctttgtctcttttgatctttgttggtttaaagtctgttttatcagagactaggattgcaaccccaccttttttttgttttccatgtgcttggtagatcttccttcctccctttattttgagcctgtgtgtgtctctgcacgtgagatgggtctcctgaatacagcacagtggtgggtcttgactctttatccaatttgccagttagcatcttttaattggagcatttagcccatttacatttaaggttaatattgttatgtgtgaatttgatcctgtcattatgatgttagctggttattttgctcattagttgatgcagtctcttcctagcatcgatggtctttacaatttggcatgtttttgcagtggttggtactggttgttcctttccatgtttagcacttccttcaggagctcttctaggcctggtggtgacaaaatctctcagcatttgcttgtctgtaaaggattttatttctccttcacttatgaaacttagtttggctggatatgaaattctgggttgaaaattctttaagaatgttgaatattggcccccactctcttctggtttgtagagtttctgccgagggatcagctgttagtctgatgggcttccctttgtgggtaaccygacctttctctctggctgcccttaacattttttccttcatttcaactttagtgaatctgaaaattatgtgtcttggagttgctcttctcgaggagtatctttgtggcattctactagagggtaattttcttttagggtgttataattattttaaaaattgattcattggaatatgttatcaatgtcaaaacatgagataacttgatgattatctctttatgaatttgaggtgctgagtatttcttgtttttcaattacagcattctttcaaatagccagtctcatgtttctatttctctcttagctgcttctttctttaatattttgttgctaatgagaacctctaccaaaatgagtaaccaaagggctgaagaaagttgaactgttaaatggtgtttgttaattgcttcttcaattacagaaggattttatatgttgagtaacatgccatttgaagatttgacaattccatcctctccttggtaactccccagtcatttggtctagattgatccatcatctttctcacttaagagcatttagttctcaccttcaaataatcagcagattaaaatagtggtacatagtcatctgtaggaagaaagaaataagctgtacagtagagtgctctgtgggtaaatatttgttgtgttgagatataacctgtgtatatttattaaatatcagtgacatttctttgcttattctttcattcactcaacagatattattgaacagctgctgtgtactaggcattgttcattttcccaaattctaaaattgtgatcatttctatttttaaaatgtattatttaacaaagtactggtaatgatatatatctttatttcccagtgggttttggcaatatagcataaagatcatgaaagtgggctctagaatctgagagcctgtgaaaacttcagctccaacactttctagttgtgtgagcgactttaggcaagttaatgaacttccctaagctcatttacttcatctttacaataggtataataatagtacttacctcatgtccactatctaaagagtaaatgggaaaatatgcaaagcatattgcactgggcttggcaggcaagtaatccctcaatagatgttaaatttgctgctgttattaaatcatagttcttgcttagttgattgttataatctttttcagtatttattgaacaaatacctatgaagtgtactcagagtaaacttggacagtgagagacaccaccatctggcctgttgtgtcataaacaaaagccttaaaactgggtcttggcaatggtgaggggaacagatgctctaactgccttctagaatgtgtttttcactatgtgtctaagctgcgatgaatgtcactaatgtcatctctctttctattttaggtaagtacatcaccatttttgaaactctgtgcagatgggtaagtcttgctgctggaacttttcctgttgatttgcatacttggaggatctggatcagacagtgtgcttatcgtggtcagaaaatgcctttattttattcaagcagagatctggaaaggtaacagaatttcccacacatgctttccatctctgtttcaaatctttggcagaaaaaaaaaatctgttatttttaattagataaaatgctatgttaaataattgaagatttaatttcttactctgtcaatagaaggcagagtagtttaaaagacttgagaaaagaaaaacaattgtttrcttcctattagaaatcacaaaatcctctctgaagtaaacatacaaatctttgtttttctgctttcaaacagggaaaattttttcagtgcctaacaaacaggtgtttcatgattagattattaatgagaaataattttgtatcaaatagaaaaagtgacaaatggccctgcaagaccwtgtgtgcataatattgtagaaggaattcctgttatgactaagagttgatgtagttaatttagtatgtctaaagttggctgtaatctatcaccacagaagagctggaagaaatgatcttaaatcacaaaggatttagtaaagacctacgtgagctgtgaaagatgattaaactatgaaatagttctcaaaaggaagttataaattccttgccacttgtgaaatctaaaaactacatagacagttatgttcrtattagaaaataaagatttatcctgccttggcacaatgtattgaattggcatgttgttctcagtaacaaagtcccaatttgcttcatcagctttaattccctatttactccatacatactctatactctatgtgttagtctgagtcttgcaagaagcccatgccaaaatgggattagaaatgcaagaattttaggaaatgcccttgtagaggaatataaggagggagccagttaaggctgagggaaacgtcaaagcatgatccaagtttgactctgagtaaagaagggagagagaattggtgagagcatccttgattgggctagccaaaggcatatgggagtcctcaagccaaaatcagccatcagaggaatcctgtttcccaggaatgtgtctgccacaacatgccctctgtgctcagtaaataccaggaagcagggcatgggaggtatggccttagctaaaatgttgcagtgaatttcagaggcatcagttggggccctttgctggttatagttcctatagttggaggtctgcagcatatcctcacggccccacacagagactgttagatcttggttctttctgtttcttattttctattacaatgccttctatctccacatcttactcattcttcatgcccaaatcagttaccacttccttcatgaaggttactctgtacaacctagtggctaataattaccattctcttttgtaattcaaaaattcttgtatttttctgtgatatttattgttttttgttatccatttattcaaaaaaatggtatcgagagctgcatttgtgctagccacttttctatgctctgtgggggagaggatcagaaaaaaatgataaaacatgacagtctaatggaaaagataatactgtagaatacattaaaatatgacagaaatgtttgaagtatgagcaaaagatatgaggagacagaagaaggaagaataaccttttgggaaagaagggagggcagtgctcagggagggatggaggatttaaagcaggacttgacattgagttttgtcttggagggtgactagctcgttaggagttgacagttgaataggcatcattttcaagttcatggttatatgaaggagcatagaaaaggtttgtagtacagagagccttgcatgtcatagggaatttatgggattacggtcaaagagaaatctgcaaaattggcctaaagccagattatatggggcatcgggtcttggcaagtagtttggactttattctatgagcccaatccaattcagaacatctcagagtcatgtgggccaggctgaatgacaaaaatattgatgtatataattctgttatggcatactaaaatggtatgattctaccaaacaaaaaagatggtgatactatatatttaaatatgttgtctatatctaaaaactactaataaattacaatgaagaaatcacattttgataaaagaagataaaaatatagggcataaggccaaaatgtaatggaacgatttagcagactcttaatctcaggtgtgagatttgtcacgaatagctattttctgctcgatatatatttactttctgtacagtgtggttataaagacataactgaaaaatctagttgtcctcgaaatatgtaaggtatcaaaaagcaggattttatgctgagtgtgctttataatatttggaaaatagttataactagttgaagcattcaccagaatgtcacttgacaattctaactttaaatatctataagccataaagttaatatattatattgattttgatttttaatttgatgtaatttcagatttactgtaaagtggcaagaatagcacaaggaattcccagatacccctcaccaatatcccccaaatgttaacattttactacatttactttattcaatctctgtctctcatatctacctttctgtctatctaatcatctatgtatccgtctacccatacacacgtttccttattgatacacattaagagcaagttgcagacatgatactcctttgcttctaaatacttaaataattcctaaaaacatggaattatcatacataggtacagttcagtggttaaaattagcaaattaacatggataaaatgttgttatctaatctacagactttattctaaatttcaataattgtcccaataatgttctgtgtagccaatgaaattacaaaatcatgcttttcaatcagttgtcatgtctctttaatatcctttaaactggagcagtttctgagtcttcgtgaaagactatttcatgacatttatatttttggagaattacatgccaattgttttgtacactctcttgatttatttgggctgctataacaaactaccatagtcttcatggtttataaacaacagaaatttatttctcatggttctggaggctgagaaatcccatgatctgtgctaagcagattttctgtctggtgaggatcagctttctagctcataaatagctgtctccttgctgtgtttttacatggcagaaaggaagagagagttctctggggtctcttttataagggcattaatcccattcatgagggctctgtccccataatctcatcacttccaaaaggccacacctgtaaataccatcatattgctgattaagtttcaacatatgaatttggaggcaacgtaaacattcagtctaaagcatagactatctttcaatttgagtttattttgtgtttcctggggatgatagtcaggtcatacaacttgggcaggaatatcacagtagggatgctaagtccttatatccagaggtagatgctgttgtttagtaccattactgacaattttagctttgatcatttagttcaagtggtgcctaccagatttctccactgtaaagttactattttcctcctttgtaattaaaaagcattttgtaccatgataatatgagagcatgtaaatatgctgttattcctcaatttcttacccaatagctttggaatccgttggtgattcctgtctaaatcagttacttgtgttattatgatggttgctgttttcattggtttaatgctgccgtaacagataccacaaactgggtaatttataatgaatagaatttatttggctcatggttctggaggctgagaagttcaggatcaaggggctgcatctggtgcagtcctttttcctgctgcatcatgacatgatgaaaggtatcacatgggcaagaaatagggagaagggggccaaactcatttttttttttttttttttttgagacagagtctcgctctgtcacccaggctggagtgcagtgactccgcctcggctcactgcaacctccacctcccgggttcgccattctcctgcctcagtttcccgagtagctgggactacaggcacccaccaccacgcccggctaattttttgtattttgtttagtagagacggggtttcaccgtgttagccaggacggtctccatctgctgacctcgtgagccacccaccttagcctcccaaagtgctgggattacaggccttagccaccgcacctggcccaaactcattcttttataaggaacctactcctatgataacagataaagtaatccattcatgaagggaatgctctcatgatctaatcatctcttaaatgtcccaactcttaacactgttgcgttttggtctaagcttccaagatgtgaactttgggagacatattcaaaccatagtggtttgctaaggggaaatcttgtaatttcatcatttcttcctcttttattagttggctttctattatgcataaaaatgtttcttcgtgcttgtttctgtgtggagtcatgaattctttatttagcaggttgttatcctttaatattgttggttaatatcattatttatcttaatcctcatactgtcctggatttggacagtacaaggtacttctagttgactcccttgtcattttaacacgttactatcattctttgagtacttttttactttttggttttagatatgagactcttgttcttttatccaagccttggaatcagctacttttatagggctctctgtttcctttcagtaaagaatggtttttagaaatcaaaatttggagagtaggtgtgcttttgcttctaggtccttttagtagacatatctagggggaaagtgtatgtatgtacatactcatatataaatgtgtgcatatatatgcatacccacacatacctatatccatgggtatattcagatatttgtatacattaaacctaggatttcacaatgataatccatcattgcagtgctcattctgttcttctccattttcgtatctgtaactctgtgagaagttacggtgagaagcctggctcccattattcacaatatattatatattgcataggattttcttacctgtggaatgtggtttcaaaaattactttcagaattacccactcacgcctctatggaaaaagagaagtaaggcaaagaaaagtatttcagtaagtagacttttagcattatttatgttttatatgcctaattctgtactcaaaattcacttggttagttcttttctcacagccacttccactcacttcacggttctgttacttattttaaatatggatcagttaatttgttttaatatataaatttgttttcatctagagttgaatcgattaatctggaatgatattttctgtttctatgtttaaaatatcaactaataatttcctttccttaataataagaaatctctagcaccatttaagactcagttaactgaggtgtaggtatccatgttttcctagagtatagagctgtgatctaaatcagaaaatctgaacaagtttgtcttggaccaaacttcaggataatctggaaacaacgggacaaatgttagtgcatgagtattttcaaacatagttctgagtaaattccaaatgcatatgtgggtttgtggctcttcatatctggttatttgtacatgatcacatctttattgtagataataaaagttgggtataaaagcaatgccattaattatgtattttttatgctttttgtttcaaaaaaggaattaagcaatcctaactttaaaaatggataaaatgcctatgtaaagctaagttagaaacacaaatgtaaaagtgtatttcgtacttggagttaagtttaggtcttaaaatattaatagcttcctcaaagatacagcaaatagagaaacctgataatatttatgtcttgagagaaaattatctttctataattaattataagacttttcattagggtctttgtgtaaagtaaagcaataatatgtttaatagtatttttatgtgagttacatacatgtacattattaatcatgaataaatagtgatgttcttatacttagtcttgttataagtcaaaatattaaatcattattccatgaaagtcttcatatagtaatttaaatcattgttaagtctggttacttgatgttgagaaagagcttagtacacatagtagaatgacttgccagccttgccattaggttatctttctcatacattacttaccttaagttggcaggagcttgattacagaagataactgtcatttatctctttgtgtggagtgcatatattgtgggatgtctataggagtattacccaaagggtttgtattacagaattatagttaacaaaatcactaggaaatgtttatggagggaagataaccacagatatatctgattacctatttggaggactagcagtggaatttcttgctgtttctcatgtggccaaaactaataaaataaaataaatttagaagagttttgttgtaccaagataatccatatatttcagttggtatggaaaaacatcttttctttcagccattgttactatgacacttagacactctagtctacaaaattatcctaggtttagcaatattggaattaaattttattgttccttcctgattgcagagttataaaaataaggattgagttattatgagaggccgattgtgtaatacatatcatgagttaaaagtaaacgttgacttttattataattgccttttgccacatgagagaaaataaactaagtgaataagactgtctctaagtcttctctgagattaatttgacaatttactagaaatagaaagattggtaatgctcagtctaggaaaggggtaaagaaacaggcacacatatattacttgagagattgtaaattttgtacagttacaatggtaacactccatgtcaaaatatgcatataacaatgcctcttgtagacatttatcctcaagtaacaagaagtaggcaaagattattttatgtattttgaccgtcaatgagttgataatagtaaaggactagggagggttggtgtttaaaacaggccaggtgcggtggctcacacctgtaatcccagcactttgggaggccaaggcggatcacttgaggtcagaaatttaagaccagcctgaccaacatggtgaaactccatctctactaaaaatacagaaatatccaggcactgtggcaggtgcctataatcccagctactcaggcgcctgaggcaggagaagtgcttgaaccccagaggtagaggttgcagtgagccgaaatggtgccactgcactccagcctgggtgacagagccagactacatctcaaaaacaaacaaaaaactaaaacagactaaattgtggtacttccatattttttttaatgatagagatattagcattgaaatttgtcacaaaactacacataatgtaattctttacacatttttaagtatatgggctaaagtatgaaaccaactctgagtaataggattataaatattctttatctccttgtatttatatttatttataccttaattaaattttgaaataatgttgttacttttacaataagaagttgtgaaaaactattaccatgaaaataatctagcaagaatttgatttaacattgctcatttcttgaaagcaagccaagacatttttttttactctttttgagactgagtttaaggtatttgatcaattgttagaggatgagtttatcattttagtgccttgctgatttgtgcaggcacctcagttttaagtaatcatgggattatttatttgttgatttagcatttgttcagtacttatgtgcttaatagcacttgaacatacaaagagaaatgagatttttggtccccaagaattaaaaatttaatggaggagataatcataaacttacagagaagtatatgataggctgtgtcaaagtgggaacaatgtagactagggaaatacaatgcttctcttggatgggtcacacctaggaggggccaaaggggacaactcactgggtattggaatgatctggatccctggattacttggttggtgctgggctgattcggaaaccctttctattttcaactcttctgctaaacatcattatagtaacatcagtacacatcctgctgttaccaagtgtcagtgtttggtcagtttgagttttacaggcatatagaactgccattttgtcatttctgtctacattgtacaaaaaagtaatttaactgagctttataacttatgatttggagaactccacagctcccgttgttctttctcaaaaaattattttcagtgcaacttagctttctgtgtatctccattgctcatctgccctagatggttcaggttggttgctgtctctattagtgtgacaagagttaataaaatgattaattaaaaagagccttaaacgtctacttagaaaacactagataaatgctaagtagggtgctttttggtggatcaagagagtccagatcactaatatatggatggcgtataaattaaatcactgtgtaagactgcaaaatgtcagagaaacattttaatatgttccccccagcatttgcctttctgtacatatgtcttagaattataatgcctacattttaactatggttttctgtgggtatatatacaaatagatagcaactgattaaaaaaaaagatctcaacttttttttttcaattcacaagattggagtatttggagatagggctgttttttctctttttttccttttaaagccatccacattttcttttctactgctttctcactcaaaaaatgtaagctagaaaaagttgatctcatggaagtaaaaaggagaacagagattactagaggctggaaacagtagggagaaggggaggatagagaaatatttgttaagaatacgaaatgacagctagataggaggaattaagtggtagtgttctatagcactatagtatgactatagttaacaacgatatattatatattttcaaatacttagaggatattgaatagtcccaaagaaatgaaaaatgttggaacatatgctaataccctgatctgatcactatgcattgtatgtattgaaacatccctacgtacaattattatgtatcaatttaaaaaatatctaaaaatatatgtgtacctaagtgtatacaccttatatatcctttgatttccttatgaaacacagcatagtttgagatttaaaatgaataaaatggttctttatgctctgtaaaattagaaaatccttcagcttttagaagctctctgttggtttattagttgatcacaaattaatatgtccctttggtttaatctgtatcataaaacaaaagttgactgttcccaaacatgtgcttggataagagaaagctgttaataaatatctattgactgaatgaaagtataaatgaataaatatttttagcccttagaaatatgtgaaaaatacctagaaaatattagacataccaaggtcaatgctaaatgtaaaatgtatttctaagaaaactctaagtatgcaaccatatggattgattaaaactagttacttaaaacctcttatgactgtatttttcttgtttttgaaaaataaatgcagtttgcactctccttgcttagaacttacgtattctatttcacaaaagtgcatgcttgtgttattaaatgtgtgtgtgtgtgtgtgtgtrtatacatatacatatatcttgatccctaatctcagttagctccaaaggtgttctaaatatataaatgttataggtcacagtgtgatctcttaacactatattttttggttgagtgtggtggctcatgcctgtaatcccagcactttgggcggctgaggyggaaggataattggagcccaggattttgagatcagccagggcaacatagtgagaccctgtctctactgaaaatacaaaaaaattatccaggtgttgtggcacgtgcctgtagtccctgctacttgggaggctgaggtgggaggatctcttgagcctgggaggtcgagactacagtaagccaggattgcgccactgcactccagcctgggtgacagagtgagagaccctttttcaaaaaagcctacgtttttcaccaacacatttcaaaattacttttaaaattattattgtttttaaagataggtatgtgccaaaattagaactttgggtccaagagcatctccacattcacataaagaaacttaagttcagtaacttgctcaggctataaagtagaagagttaggatttgaacccaggtcagagggctccaaagccctttcactttccatcaaaaacatttgatattttgccaaaaatatcatgactgtttgtccattkycatttcatatccttcaaacagctataaagtgtggagaaatgataacttcataactcacgctacagctcgcagacacacttaattagcttagggacaaacagttgtgacattatgagtgggagttgcaaggctgagttgaatgtactgatggggatgttggttaaaaacaaaaagccattctattctacatcgtggcaatctttgtacttcaaaagtagtagtattctgagaygtttactgtgtattatagaaaaattgctgatttgaatcacaattcagcaatactagagaaggagaaatctactttttctaaattttctctacagtgaaataaaatgcttttggaatatttacttgaggaatgggttatctgaatgttctcactgaaactcattacaccgtatagtgaaaatctagttacaggtagttgaagtgtaggtatagatagtatgtgattcataatgacgcatgtatgccatgatttacctcagtcactggacagtaagaatgtgattaaggaagtttcctctgcaacatttcaagataagttagctgttttgagccacacaaatattaaactatgcattgtggccaagtgcctataatgccaaaagcacctgtttcaaattgtgagtaatatcttatgtgttacactaytgaaatctccttgttacagaatattaatactacctattgaaaagagtaagaaataagagtttctcatttccacccttttggatttatttcatcaaatgatgtgttgatgaataatgccctttctgtaagatggataactcatggaaagaaagccatttggacatggatactcaagattttaaagaatttaggaggtggcagtgtgaatatcaaataaggtgccacttgtagagagagtatctcagaaaaggagcagagaatcatacaatagaaaagtgaaaagctgtttcctgtggtagatagactctaaataatgattttagagacagacataataaattaatttattggttcattgaagaaacatcctgagttcctatgacatgctaggcattgtgctggtgggggcgagggttgggtgagtagtggcgtatggagatgaaaagatgcatcagacatggtccttgtcttcatagaactttccacagggtaaaactggaaaaaccctgctgggacagagtgggcatctattccggcttaggcaagcatatcttatcctattgatatctgtacaatattatccttaaactagaaatacaataatatgttttattctgacaatgaggaataattttccatattaaggaataggttaatctctaaatagtatgctatttattttatcttactttttcctctgtgtttttaaatatttaacaatttaggtagcatcctagcagggcatcactagagaaataaaatgaagcatttttaagtaaatatattttacagatcatttggaattgtttcaaaaacttcattaacttttaatgaaccaaaaatatagttcattggaattaaatgttccatgtgaagatatttatttcggaaactacatgactaaaccaatggtaagttgaagttaaaaaagtgaccccaagagagggacaatgtcatattattattgttataacccatatatgtttaataatgaccatgcaggatggtgcatatagmaaataactaggtaaagtttctaggaatttttattctatttctcttctttcaattctaatgtatgggccaactcatcattttaatacagagctttgagagaaaatgcataaatgtaattttctgtatgatcactagatggcgccatgcttcccttagaatgaagctgctcaggaatttgcaagtgcagttctgagtatttcacatagaaacctggaagatgagacaattgtatttcccataaggttttgattcactaatatcatcaaaacaacaattagcacgtgttactttgcattcaaaaagggagtaacgattgggtttgtaaacagtatattgaaataatcattactgaggacaaaagtgaagcatgcctctaagaggtaattcggaaggtctcttttgctttccaaaaacatactagtaacaaggaaacatcttatacttgcttggaaaactgggtcctagtcaatgagctatgtcttaaggaatggaaatactggcaaatgtggtaaagtttacatagccattttctgcaaaccaagaagataaattgcattctgcctagtcttaggcaaacagttgggccatttactgttccatcaaaaaaaggattgtcagatccccaaaagcacaaggatgcatatagagtgtccatttaaacttcctgatcaaagatatacactcgtgaaggtggagtggaagacttctttataggagtatgattcatgtttataaaattggagacacttagaaagttgagttaaaagtgactcaaaggatatcttttcattgccctttttatagatggaaaaacatggatgtagctgtttcatacagctaagacactagtgcatcaaaacacaatacatttgtgagacatcttgttatgatttcaaagcagtttgtcaataaatgtgtatgttcaatggttacagtttgggatggtaagacatcatcagctcagaatagtaacatccttccctttatcttttttatagaactttaaacctggatgcaattttaagatcatatgcatcattttttctatatggtgattacattctagataaattaatttgtgatacactctggactttttrtattacatcaagttgaagtttccttttgtggacttagaaacaaaaaatttgcagtaataaaaatgaaaagagattatgcaaaaataattactaatgaccatgtttcttaggtgatgaatttaattgagtgttggtattttaagaatacgtgcatcaagcaaattataatgtaaccaaatatccagagatttgaggaggaatatcaggttattatcacatttcagagctgaatttttcttctttggttcattgactgcattgaatctttgttttgtgggtgatataaactttttcatttcattccttgctctaggagtgactctggggaatcattaggtacatgcttgttggttttccataataattatctctgagccctaatggtttctggatttggcctctcttcactttctccaactttaggcaggagttcagaatggccttcagttgcaaagagaagtataaatccaacttaccatctagtctctttctgtgtggtcttggcaaattttttaatcctggctaggcatgctgttactggcagaaatgaggttctgcctcaactttagctccagccctgccgttagcctgaagactttccaagatttagggagggtccatgaatatctcatcttcaagagtgtgctatagagttatcgagcaactcagatcttttaaaaatcttgagtttaggaatcatacatttaaatgtcagttctcctagaaaatgaagattttaatcctttagaaaaaaatctagggacaaggaattctagcatttcctaaagattccatcataagtagtgcttttaatgtaaagggtttctttgaaaaaaattatttctttactttttttttttttttccttgagacagggtctccctttgtcacccaggctggagtggagtggtatgatcatggctcctgcagcctctacttgctgggctccagtgatcctcccacctcagcctctcaaatagctgggactacgggctcacaccaccacacctgtctcatttttgtattttttgtagagaaggggtttggacatgttacccaggctggtcttgaattcttgggctcaagtagtccttctgcctccatctcccgaagtgttgggattacaggtgtgagtcgtcatgcctggctgtaaaattgtattatatttctaatatgaagaaatacttggtttctctttactgtttagaaagataattatcatgattgttttctttattaactcctatatgatactttgtatttttatcccctgctactcaccccaagcttatttttataattagaaaggaatcaagctagccaaacaggagttatccttccttaaggtagagaagttactrttttttttcaaatggcgatctgcctgcctgagttgctatttggatctctgatgatttcttcctttgatcccctaactcaaagcaggcaatcaaggctatgctgttagttgtaaccagatggaaacctgatctccatttatactttgcctcttgtattgataacaggacatgaaccaggatagatacactaacagtatttgactctgctgcagttgccaggctaaataaccagaactcatatctcattctactctacctatggaaacactctgtataatgaaaatgtgtgttgaaagtgtgtgggtatatgttgtgtgtatatgcattaaaattctcattagcatgggctggttgtaatagtgcatacctgttatcccaactacttgggatgctgaggcaggaggatcatttgaacccagagttcaaggccagcctgggtaacacagcaagaccgccatctatttaaaaaaaaaaagtaaaaactctcatgagaataataattaaagtagctatgttgatcattgcagtaattaaaccaaaatattaatactcatacctgatatagttttttccactttattataattacatttctctcaaaaaatttaagaattagtatatgtttaacatatacaggttgaatatctcttattgtaaatgcctgggaccagaagtrtttcaacctttgaattttttttttggattttggaatacatgcatacacatagtgagatatcttggggataagaccttcatctaaacacaaaatttatttatgtttcgtatatrccttataaacataggctgaaaataattgtatacaatattttaaaatgctttcgtacgtgaaacaaagttttggctgtgttttgactatgacttgtcacatgaggtcaggtgtggaattttccacctgtgacatcatgtcagcactcaaaaagttttggattgtggaacattttgcattttggattttcagattaatgatgcttaacctaccttgtgaaataatggagtcctttattaataacaaaacaataatagatgatacttacagagtacttgtgtgtcaggctctactctaaacattttatatgtattaaaccaattaatcttcacaaaaactctgaattagatatattattattatttccatattttagaggagaaaactgagaaacaagtaatctagtctgtactctaccataatgctatgttacattctatcaacactcccactgcctcttctgaattcattgatagtggtgtggtggcatagagtccacagagtggagcattaattaattttgcataatgtgaaagtaaaacttaagaaaattttaaggaatagacagtgtgcagtgttatggaatcataactatacaattaaggggttaaatgaaatcatgcccaaaatgctgtgttttaaatggtggcactgactgataaaatgtagatttgagttatttattgtttctacattctcaagtgaaaaaggaagaaagtaggaataaaattctggactattggggggggtgtctttagtcttgcaaaaagtaaaaaatagaaatagaagaaagtttttatggttcatattgtaacatcaaaatatggaatgaaaactgtggtctcccatgaagtatttcaggtgctggaaggaaatctcctagactaggactctcagcaagtccatggttcctattatgtccagcatgccatagaaaaactccagaattagttaaatwttaataatttaatggagaaaactaatttttcaaggggcagctagttaacttcagcatgagtcaaaaagcacttcatctgtcaatatttatgtaaatatttattttgaattatacatttatttagagtatttatttacattagaatagagggaactaaggccgggcacggtgactcatgcctgtaatcccagcattttgggaggccgaggcggacagataacctgaggtcgggagtttgagaccagcatgaccaacatggagaaccatgtatctaccaaaaatacaaaattagccgggtgtggtggcagatgcctgtaatcccagctacttttgggaggctgaggcaggagaattgcttgaacctgggaggtggaggttgtggtgagcagaggttgcagtgagccaagatcgtgccattgcactccagcctgagcaacaagagcgaaactccatctcaaaaataaagaataaagggaactagccatctgatcatattacaaccaaagccttttattttcttcataacctaactgaatgtgtcaaacagtttgtgattctgtcctccaaatatgcatgtatattccaaaagaatctgtgaccctcagtaggcctgtttttaagtcagtgaactaattctttctttctttcttcttcttcttcttcttcttcttcttcttcttcttcttcttcttcttcttcttcttcttcttcttcttcttcttcctcttcctcttcctcttcttcttcttcttcttcttcttctttcttcttcttctttcttcttcttcttctttcttcttcttctttcttctttcttcttcttcttcttctttcttcttcttcttcttttttttcttgaggcagggtctcactctggactctgtccaggctggagtgcagtggtgcaatcatggctcactgcagccccaaactcctggaccgaagtgatcctcctgcctcagcctctgagtagctgggactacaggcatgggccaccatgtctagctattgttttaaattttgtagagaaaagatctcactatgttgctcaggctggtcttgaacttttgaactcaaccaatcctccagccttggcctcccaaagttctggagttacaggcatgagccaccatacctgctaactaattctgaaagataagtcatagtattgaccataatagtgatgaaaataagtggaatcccaggaggaagcctcatctgcatgtggtgaatatgtaacagtaaagaggatgatcatagtaaggctttctactgtgcatagcatgttagcttttactcttgcttttacatattcatctcatttaaagtttttgctcattttaattattctatgatagatatgacagaggcagggaaagtattatcctcttctccctttactcccaattacagaggagtacctgaatcccacagaattgacatatttcctcaatatcagttagtcaacatcaaagagacttgaactgctatagtcattatatgcagtcttaaggacacactctccacattttaaggtttaaggatggataggatttccacagaagtataaacagaaaaattgaagacagaggaaagaatactggacaagggcaaaaaaacaggaagtatggtacaacttggagaaaatgccagtgagctgctaagctcaggtacaggatgaagagaattagcaggcagatgttgatggaatgccgcaggaagatccatcttgaatggtttcgtgggaacatagactggatgtgtgatctaagaaatataagactagtgggttagactcagcaaggggtaatgtggagctaagtttgatgactatagatatggaaagactcagggacagatgctacagaaatttcaaagttttgataccatattacacaaactaatatggcgcttgaaaaagagtgagacatctaagatgattctcaggttcgggtctgaatgactgggagaataatgatccaggaacagaaatagggaaatcatgagaagatgctaaattgggaggagatgctgggtgtgatttgctgagtttgagtacaagcagaccatgcaagtagttatgtctaacttggaagcaaagtaatggtgtgcacctgtagtcccagatattctggaggctgaggtgggaggatcaattgagcccaggaggtcaaggctgcagtgagccatgatcccaccactgcattctagcctgagcgacagagtgagactctgtctcaaaaaatgtaatgcaatgcaatgcaatgcaacgcaacacagcaaaacacaacacaacacaataaaaataatgccttcagaacctcccccccaaaaaaaaattctaggagggaagtggggtaagcctagtgaaaattctcaggctaactgacaatgtgtatgttttgctaaatggacttcagttggcaaatcaaatttttgagttagacattaataatattgaaatgtaatatccacccacattgtccatttcatagaattactctgtttttgttgttcattttgacatttcctaagctgtcacttgacccagactgacacattatcatctgcatgcacctaggctctgccttatatatgtttacaacatgcaatgaagcctagtgcctgtaatcagaaagagggtgctgcagtccatcatgtgaaaaaagagctggactatgaatgaggaaacagattttactctgacatcaaggctggccgacagcatctgtcatgcccctaacacaatcatgctaattataagccatcactttcattcttcttggaattcagaagtcaggagggttgtaggggcaaatttctaacgggttgtggaatctatcattgctaggaccttttacaattcagttgcttactctttttaaaatctgccattcagcagtctttttcagtaccagtaagccacgctatgcattcctatgaataaagtgcacagcaacagcatccaaatgcagtgacggaactgtatggcttctccttggaatagcttttaaaaacctgcttaggcagggacactttattgcttgctgaaaaattccaaaagatttgtgactatgtttaataaattatcaagaactatatagaattccttagaccttttttctaaaataaacttttggagattttttgtttgttggttgttactattatttttagagaaaggacaattaaattatcttcagatcccagggaatggtagaattagtctttttggcactgatagtaaggtaggtcatgtcttagtccatttggactgttacaataaaatatcataaactctgtagcatggctgggcacagtggttcacggctgtaatctcagcactttggaaggccgaggccggtggatcacctgaggtcaggagttcgagaccagcctgggcaacatggcgaaaccccatctctactaaaaatacaataattagccgggcatggtggcgcatgcctgtagtcccagctactcgggagtctgaggcaggagaatcgcttgaacccaggaggcagagcttgcagtgagcagagattgtcccactgcactccagcctggccgacagagggagactctgtctcaaaaacaaacaaaaaactgggtagcttataaacaatagaaatttatttctcatagtgctggaggctggggagtccaaagtcagcatgctacagatttggtgtctggtgagggccaggtttctggttcattaatggtgtcttcttgctgtgtcctcacttggaagaaggggcaagggagctataacttggaagaaggggcctctttaatatgtgcattaatcctgttcacaaggctggaggcctaatgacctaattacctcccaaaggccctacctcctaacactattgcattggtgattagatttcaacatttgaattttgggagggtgccaatgttcagatcatagctggtcatttcagcttatttgtactctctaagttatgctgcaataattgttggcttctgtacatgggcaatatggaaattaaagcaatcataacattttggtagaggacctgaggagagattattctgaatgtgatgaagttatagtctttttcctcaggtggattagatcactttttggatagaaattttatgttgggaaaaataaaaatggttcagtgacctgaggcagaaaaagtctgttcacaggaatataagataattactccatcaactcacagttgtttggaatgtcaggatcaataatagtcctcagaacattgtaaccttactccagcaactatgctaacataaagcagagaagtctgaagtctgtccattagtattggtgacaaggtcatggttgcttttaaactttgcttgccaaaatacctggagggaactcaatgtgcatactcaagtttctgctgtggcaaattgactgttgctaccccaggagaccctaggaagacaatcagttcatgtctgactggagacattgcaactttatttgtatgaactatttgggtcaaatttcagggggacatgtcactacagaggggcagagggtcatgataatgaaaagaatcattacgttatattggtaattagatgtatgactctacaaacttgtttttccttgggtgttagtaacattctttttggagatagatggcattttacaaagtctatccacagaaaactggaagtatctaaagataatgataatgacgagaatatattcattgtaatctggcatacagaattttctctgccatttaagaagctgaatttcttttaagtatagaaaggttagacttatcaaccttatttgcagatactatttatgtttttcatgttttctctctgtccttaaatattttctgagatttaggcactgagctctctgctagacattttcaaattttatcttttaaaaaatcagaaaacctctctttatgaatgaaatttttcacaaaactctgatatataaaacaggcaaaatgaaaccattatggcaggaatgagtctgggatttgcctatttatttttctttcttctttctcctgtctgctaaattttctacaagcaaggcaagcagttcatgaatcaactgttgactacttctgaaacctaaaatgaaataatatatatgaaagctgttattcagtgatttatacttatcaaaatatacttgtcaaaatattaactgatttgtgtttgtcaaaataaatatattcatacatagcaccttggtaaatcacagatctagttgtattgtaggtgcctagaccaacatgacaacttgattatatggcttgagatatttacatcactcttaccacaaaaacgtcaataaacagagcttattaatcttttgaggaggaggaaatgaaggtgtaggaaagcatgtatgaagttctacagcatttgtatacatccatctttgggaactgagtgagcaaaaaagaataaaatgttgatattagcatgaaaactctcactaactctataaatttcttgtcaatattaggcctgtttctaaagccaatcagaatgaaggaagagctttttaaaaataggcaaatgttggttacattggcttcaattttaaaacaaagttctacattctcttcagaatgcgaaggaggttgaaaaaggaggcatttcctgcatatattttgagatgagacgagggtgagaaaaggagtagagctgaatgttatgttattctgttaacctttgtcaggcccatcaggctttatatggttcaaatttctgctgtatattttgatactttctgtctccacagcagttactcaggaatatatcccaataatgacactgaaaatgcagtgaatttataaatagatcccgctgctgcatagattccattatttagaaaattatacagsgttctgtaggaggttgaacatacagtaaaatagttcatttgcttagaaacaattattataattgttattataaaatctaatagattattagaaatatcacaatataatcaagcaagcatcagactaaataaaatgattatttaatatttgcttcatatgataaagaaaaacttaaaattgattttctatttgaaaaatatcaacagaggctgggcacgatggctcatgcctgttatcccagaactttgggaggctgaggcaagcggatcacctgawgtcaggagtttgagaccagcctggccaacacagtgacaccccatctctactgaaaaaaaaaatacaaaaattagccaggtgtggtggcaggcacctgtaatcccagctactctggaggctgaggcaggagagttgcatgaacccaggaggyagaggtcgcagtgaggcaagatcacgccaatgtactccagccttggagacagagtgagactccatctcaaaggaaaaaaaaaacaaagaaaaatatcagcagaaataagtgagttgagtaatttctaaatcttatttcctatgtaagtggttaagaaataattaacttttgttctagaagtattaaggagacaaattgcaaaatttaatgtgaagccttggctcacaataaatactttctttaaacttaggatatatttaaagtggaataatattttccaacttaaaatgtaaccatttatttttttctttaatgtgtttgtgtatacatctccttctttgtcaaaggtttgagtagaattagaaatagctgcaatttacaaaactctattttgaaaggaagaaaattaataataaatagcagaagtaaaagttatctttctggaatctaggactctcacccactctcatcttcaatatttaccccattgtttcacatatggaatattataaaattaaaatataagagaacggatatgttattattcaaattattttcattgagggtggtttgcccagtttcttagaagcaattaaaaggagaggataaggtggttttcttaaaatagtgctttctttctgctgaatttatgtaacttttttaagaatggcaatctaagtgtacaaatgatgtttaattctcatgagatttcattttaaaccttgctttagagtaaactttatgagtaataagattatacgtgtgggaaactgaaactaaaaggattcaaatggttttgacaaacaacagatattcagggtcagtgcaaataaggttacagataatcactccatctgctccattgtcagcaaaaatgaggcccaggtgttgcagtataccttgtcctttctcctgaattgtgaccattgacaaataagattttcaaagagaagtctgaattccttagggtttagcctgagctcttgtaagagtttctttccagccaaagtattttcttgttttcctgtcaattcaatgggttagaccattccatccattagaagaaagtagaggaaatggctcaaccttgcccagagtacagctggttggaactctgacaacggaactgtggcccagggtaaagagcaagaggctgggggaagcacgtaatgcttcttaaagcctttgatctaaaatgacagactgtcatctccactcacattccattagcccaagcaagttttgtggctaaccagacaatgggtctcagcaatatatcccccctcccagaacgcctgaacattcaagtggcaaaagagtgaattgttgagaacaataatatagtctataatagcatataatgttcataaaattagcaccccaggcaaacaggacagaatgcctatccccagccacagctttatcctggcctacaacgctcatttatactttctttcctgtgtgaaatgaactacacttagtttattttaacctgatttttacaaacccataaagaatgcaagagatgcagtgggccaggaagaagtgagaatgttgccctatgtgtgattttttctagaatctgtctaagttctgctttattcctggatatcttgatatggaaaattaataggattgcatggtaacttccttatacacaagtttatttacctaatttagctcaggagtatgactcaattactagcaacctaaacatgcaataatgaagggaatctccatgttgcttatgcaaacatctagagtcatatgtcactttgtaagtagacaaaatgtagggcatgtgggctggacatgtcaacatgctgctgactttatctgtcattaatttttgttgtgtaaattagcatcctaatgacacacccccactgtattcattctgtgccctgtctcgccccttaacttggagcaggtaatggagtttttaaacatcatttgataatttgccctcttcagaaagtaatactaaggaaaagctatttaaagtgagcagaattccttttatctgttgatttagaaatattatttatattgccagaaatttaaaatgttcaacatgtttatagttattaaaactttgtaaaagtaaagtatgttaaatcttcaggagtatcactggaggagctagatgacaaaatatatatatatatatatatatatataatattatcatgaaaatgcagtgctggcaaactgctcctgggattataaatatatcagtaaaaccaccctttctcctgtatcctttcagcattagccataaaatagactggccagtaggggttactcttggcattatgatctaagagtggtagattagagtttgaagacataatgagtggtatttttaaaaatagctattatcgttgtgaatttaggtgcaatattcagaattcagaattggtgataacttgctttgagcactgtttcagcagcttttatcctattcatatgactgtcagacatattccaggaactattttacttagccttgttgattgtccctcattaaataaaatccacaggtcaaaattgtaaagtagccttttagttcaatttggcatctttttttcctgggtgatattctcagtcccaggggtttgaattccagacatccttgaaaacaaagccttatatgaatgtagtcagaactaactctttaaaaggcaaaagcacaaccacattcagttaccctaaagtaactgtagtcaggtggctcttcaattttagaaaataaattactttcaaaaagaagaaattagaaaagggaggaaaaaaataatgaagcctcatggacatttgtttttgagagagaaaaaataaataaaaggaagtggttttaaatattggtttcataaaaacaaaacttagaaaagctttttgtctgaagcccaaatggttacaaatgagctctgcttactaaacatggggcagaaagagttcattagaataaaatactattaccttcagaagaaatatgtattaccaagggatgaaatgcaaaagttactaattcaatatttatttatttatttatttatttattttggcgacagagtgagactctgttgcccaggctggagtgcagtgctattatcttgactcaatgcagccagcctctgccttctgggttcaagtgattcttgtaccttagcctcgtgagtagctgagtctacaggtgtatgccaccacacttgactaatttttgcattttcagtagagatggggcctcgccatgttgcccaggtgagtctcaaactcctgagttcaagcaatccacccatctcggcctccccaagtggtaagattgcaggcatgagctaccatgcccggcctacttcaatatttattttttaataaatcaagtttgttatgagagagttgtcagagaataggaatcttctaactgctggtatcttgatgcattcagagctcaaggatgtgtggtgtggttcagaccatttcgtgcacactgtagcagaaggattgccctttgatggctgggcaagggaacattatgatagatgagttatcaaaatattgctaaaattctttaggcagtttgatatagatgttactgtagctggacactgtcagagaaaggagatagctgtaacagagtaccaaatgaaaaacatttttgaatagactgtccttaagacttcttacctacgaagactcctaatctcttcttatgacataattatcggaaaggcctggaggccacaccttgagaagaaaagcacttatcagttgtgattttcattttcttcacagttttctccactcagctagcttacagaggaaaccaaaatgcagttggttgtttctctttactaacactcagttcctaagtgcttagctttagaagttttttctgcctgtttacttccacttcttgtgtgacataacaatattttagggttttatttttcttttcaaaattcttctggtctttggaaagaaaattaagacactatttactctatgtttgctgatgcagaaccagtaagtttgttcacccacccaagtgattcattctaagcaaattctcccattaggcatttgttgmaaatctgcaaaagttgcttttatttactgattcaacatatcccttcccagtataaggatctcctttgacggtgaaaatctccttggattgcataggttttcattgtacagagaaggcttgaccttaaaaatttaagtygcattaaaatttcttttatgttttagagagacagaggcactctgttgcccagactggagtgcagtggtgcagtcatagctcaccgtaccctcaaacccctgggatcaagtgattctcccacctcagcctcctaaagcattggcattacagatgtgagccacctgcttggctgaaacttttcttgaaacacacacacacacacacgaacactcacacacacttttttatttataaagatctcaaccaactttttaaaccatgcaataaaggaatatctttggcattggcaatgtatatttgttgactgctggagtcctttgggcaacatcaaacacccaattgctcattttaaaatctggctttccacgcctgtaattccagcactttgggaggccgaggcaggcggatcaccaggtcaggagatcgagaccatcctggctgacacggtgaaaccccatctctactaaaaatacaaaaaattagctgggcgcagtggcgggcgcctgcagtcccagctactccagaggctgaggcaggagaatggcgtgaacccagaaggcagagcttgcagtgagccgacatcgtgccactgcactccagctggggtgacagagcgagactccgtctcaaaaaaaaaaaaaatctggctctccattttgggttcttaggtagatggaatagagtttccagacttgagggttttaattcagcaacccaggatcaacactttctaggtgtgagactttagtaaataatatactcagagattcatggtttttttttaatctataagttgcagaaaataatatcactatcatgcttttttaaaggattaaataagatatatttaaaaatttgttatccttatacctggcatagagtaagcgaacagtaaatggtatatttgtaattattcttttttacgttgctttctacttaatatgcgtttattaagcttcaccttaagtataatttagcaaaggattatttcagttttcccttaaaccagtttataagtttacatagggaggttaaagccaacaggaatttttatgtaataaggaaattcaaatatttcagtatctgtgataagagttgtgttaatttgcagaggaataacacaaaacattgattaaatttggattgctaaatgttaaacagtgtttgtacaataaaagtgtgattcagaaaaagccttattataacatgcggaatgtattagcactctttggagacttactatcttttaatttattttattaagctgctgttgtgagctaactaataacataagtgtgaactagtttgaagaagaattgcgattttattgaataatattctgcaagaattaaatatcaataggttagcaatatctcctcattgagttaaagtatatagattgtatacatgttctatgtatatactatatataaatgtttagatagtatatatgaatggcataattactataagcttacagggaaatatgcagagttgctgttatttttagaaagtaaatgatgacatttattttttatctaaaactttaatctgttcagtgatttagattcatttgagctctaatgatttggagagtaaggcacaggcatagccttaatttattggtgatgaaaaaaatctacttattggcaagatgggggaaaaaatcacaagccttgtatggaattgtatgattctgcagagttgcaatggtgttaacaattgtgacaagttacactttctgagacaatcttcaattttagcaattaaaatagcaaagaattattatttataacagtattcataacatagcaaatggtcatattccttatagagacagcacttccgagtagtctttattttgtttttcaaatttgtcctttcaatatctcaaaatatcttgtgttgcaattacatttccaagtatatatttggttgggatgaaaatagctgtaatagtagtagtagctaccatttattgaattcttgccacgtgcctcatattttatgtggtgtatttgatcttaggccttaggacaactgtaaaaggcaggtattgtagaagacaatgttttctgagagactgaaatgacaaattagaaaaaaagttaaagacttcttggaaatgctatctctataaggaatatgaccatttgctatgttaatactgttatgaataataattatttgctattgtaattgctaaaactgaagagtgtctcagaaagtataatttatttgtcacaattgcaactctgcagaatcacccaattccatacaagacttgtgattttttcccctaacttgccaataagtattattaccataataaatatgctgacgtttcaaagtttaagaaacttcctacagttctcacacgtagtggtgacaatatggctaaggggttaggaatgcccacatcctcctatgctgcatcctgcctgtggtttagatttgagatagggacccctactttctttcccctaagagcagatctgtgtcattggctataactgctttctggtcagccacatgacacgtggacttaacagatggtttctaataagattgaaagcatatcttgactccacttacctggccagcactggagaaaggaagattaagagagatttggatgagtgtccttgtcacataacttcccctccctagaaaacttggtccaatacgttgtaatctggtggtgcaaactcacaacttttcttcccttctgtgagtgtgtatatatgtgagtttattgtatgtgtgtgtaaggtgtgaatgtgtatgtgaagtctgtgtgtgatgtgtgtatatttgaatgtcctgtgcatgagtttttttgtgactgaagtgtgtgtgaggtgtctgtatgtgggatgtgtgtgtctgtgaggtgattgtgtatgaggaatgtacatctgtgtctgtggtatatagaaaacgtgtgtgtggtgtatgcacttgctgtgtctgcatatgcatgaattgagtatgtgacttgagtattgtgtgtgtaggaggaggggggaagtaaaaaggcaaggtgacagtagagactggacaaatgaacatagccgggcactattcctttaactcctagaacagacataacttgaagtgatctagacttgaactttggagtatgaagttccagccagctgtgtaactatctatttaatatttggaagcgcttagcctgcttaaatcttgattttatcatttctattagagaagttttaacttaaatgctctaaggtgggggtgtccaagggagaaaatacagtcatgggttcttagtttctgtttctggttgggccagaaaagctccttcctcatccctcttttccacttatcaacagagacagaagctaaaaaccatggcttctggctgctaaagcctaaaataaaacaaaacagaacaaactcatcaacaataacagcaaaataaagcaggttggaaatgactgctctaagggtgaagtgaatatgttcaggttggagttactgataagttgtaaacaattacaaggatgtaaaatattgcatatttttattagtggcattacttttccaacattacattttatattgaagttccagaacaacaaaaaaacactaaaggtattgcagtgaggaacttatcagtaagtgcttctaccttcaaggaattaagttaatttttattggcaatatttggaacattgtatcaagaagaaagactagctaacgaatctcttttgcacatcaagctcttacagtgttaattcattaaacaactaagacaattttaagtaggagctttggtctaagatgtgtggccgcaaactgaaccaatactgacagaatttggcattaatttttttttcagagaattttttttttaatatatggcaatggttgaaaaaaaacatagaatattgtagttcctcaaattgttaaacacagagttatatgatccagcaattctacttctaggtatatacccaaaagaattgaaaatacatagacaaatgttcacagcaacattattcttaatagccaaaaagtggaaacaatccaaatagccatcagctgatggataaacaaatgtggtatattcatacaatggaatattattcaacaataaagaattcagtatcaatgcatgctattacatgtataaaccttgaaaacattatgctaaatgaaagaagccggaatgacataatttcatgattccatttaagtgaaatgtccactatagacaagtctatagtggattaatgattgcctagggttggagggggtatggggaattgaagattgagggtcaaagggtttggggggtgtactgaaaatattctaaattgtgttaatggaggcacaactctgtgaatgcactaatgtcactgaattgtacattttaaacaggcagattgtgtggtatttcagttgcatctctataaaggtgttaaaactaaatatagaacaattttcctaagtagtggcccctcctcatttattggaccaatagtttgggaggaaccagtcatgaccttcctgatacaaatcaacacctacagataggatgggaggcaattgtgctaacaaagtacctcaaaccacaaagtctgtcagtaaactgatgcttttgtcaaggatgaatgaccaggggcaggtaataggtgagcaactctcaactcttttgtatatggtactatagtctggaactagcaagtactgaaaaacgctagatgataaaagtcattgttattttattcttccctctcccttcctcccctcccctgtgctccctttcctcttcccattttatttatttatttgagacttggtctggctctgttgcccaagctgagttcagtagcagtatctcagctcactgcaacctccgcctcatgggcttaagccattctcacacctcagcctccagagtagctgggaatacaagtgcatggcaccatgcctggctaatttttacatattttgtagagacggtgttccaccaggttgtgcaggctgggcttgaactcctgggcttaagggatctgcaggcctcaccctcccaaagtgctaggattataggggtgagccaccacacctggcctcccctccctttttcccctcccctcccacccttctcctctccccttctctctcttcccttcttcttctttcccccttttcctcttccttcttccctcctstctttccctttccactcttttctccttccccactcataaatagatattataatgaattaatttagaattatagttaagcatacatttgaagtaattgttccaatttcataattttgaagtattttctgagaataaactgggcaaatgcagaattgggacaaatcctatgtgcaataattgctaataggaagtgttctgaagtatgaattctctcctcctttcttgtttgacttgtcactgaatctccagtcctacagagtactatgtcctgcttattgtttatttataccacaccccacttctacgtataaacatcactttcactacggtggattcaaatgatctcttaggaatttagttacattacagtctcacataaaattactgcccttaaaaacatttgtttgctgggcagggagtggcgaaaccccatctctactaaaaatacaaaaattagccaggcgtggtggcgggcgcctgtagtcccagctactctggaggctaaggcataattgctttaacctgggaggtgcagcttgcagtgagcagagattgtgccactgcactccagccttggcaacagagtgaaactctgtctaaaaaaaaaaaaaaaaatttttttttttgctaacattatttgaagaatagtcagttcagtatgcatctatgtagacctaaccaatagttgtattttacaagtttcagttttgaaatgttggatgatatctttcagtttaaaaaattagtatttctataaagtgtctttttttggatggaaatgtttctggaatgtgacacttaaattttaattactattattaaatatcaatggatttgttttgcataaccaaacagttggataagttcagtttatgtgctgtgcaatactaagatatttacttggcatggagagaatcactggcttactaaataaaagaattcagcattttgtttgtcaatcctatgttaattgcatttatatttctgacagtttccttgatggaattaaaaaaaaaaaacatgcaataagatctgaattgagtgttgaaatgagtgtttcctgagctccaattagtgaaagtattgagatttgaagaatggttgaggagacaaggttttataattgcccttctgggaaaaagaatgagtaaacaataaagtcttgagatctctcaaacaaatatacagtcataaggaaagtttaaaagccacagtgaaatgcacacctcttaattatgttaacattgatatctattttaaattgatatcaatattagctgtgaaagtttcgtatattttgcagggacaaattctcttagtgtactccaaatgcttattgttacacatcctgagcacacaacgcaaacatattgggcaagcaaagaatctaggctgatatgtgtgaatgcttatgtggcattctatcaaaggagatagatgtacataaggggaattatggagaagtgaaaatttgtctaaggttcattttttcagtagcttaattttaatagtaaactcttttaaggaatgaatggccacaggcagagactaatggtgtactttcagtgttctcagtgagtgcttcacagattaggtttccaagagaagaagattgcctctgaggaagaagagatggggtagcaagaggcatatatgagaccgttcttgggaccaacacctatggaggggagggaagaaggcagaattatgggaccagatagaagaagttggtctgcaatgcagtcttgaggaaggcctcagcagagccaatagacagttccgaagctggcatgcccttgagagttgtcctaaattcgggtgagagggttaggcctttatatccttggtcacttgatagtagatgctggaacaaaatggtgctctttagctaaggcaatttacagagggctgacagctgagagcacttgtagaatctaggaaaatgagtctttcattcttgaaggggaatcttcacatcatccactacaaatggtgctatattttggaaccagcagacactgagaaatgccaggtggatagaatccttccttcttttattctatctttttttctttctttctgtctcctaatctagtgcttctccaaaaatacttttaagaattagaattaggccattagttattataaggaaggaagggaaataatcattttcataaaactcagcaattcttttaatgtcaagatatggattattattacactcaacaattataattattaatattttccacggaaaagtttcatatattgaatgacccaagtactccatgtgaccttccctgtctatgtaagcctagcattctgtcagccaaataaaattttggaaggaaggtcagataaaattattttttcactcggtgttaaagaaaagaaaaaataaagaacatttattgagcatgcactaaatatgacataaaagatctttgttttctgtattagaggttgagaaagaatgaaacagtctattgatttgaaaagctttgctctcatttagcaattattattattattattattattattattattattattattattattgttgagacagagtctcactctgttgcccaggctggagtgcagtggcgcgatctcggctcactgcaagctccgcctcctgggttcacgccattctcctgcctcagcctcccgagtagctgggactacaggctcctgccaccacgccaggctaatttttttgtatttttagtagagatggggtttcactatgttggccaggatggtctcgatctcctgacctcgtgatccgcccacctcggcctcccaaagtgctgagattacaggcgtgagccaccgcgcccggccaacaattatttttataaaataaaagtttattaatgaatttatacaaatagcactttataaaaactacaacacattcatttgggctgggctgttgcctggttagtcacattttttcttctttatttagctattgcacagcttctgaggcaaccacaaaaacatcaaattatggagaagtgagtgcatagatatatgaaatcaacatttcaaattggtaatagaatgaccttacttattaagtagtgatcttttatcaagctgctacaataaaatcgaccataacattaaacatggtagatgttactaaccagaaatcttaggtatttaaagttatgtttacttattttttttaataagacttggaagtgtcacttaaatcacacttaagaatggatattggctaaaggctgctgagtcttttaagattcctgtgaatttttttcagattgttcctcagtcaattcaggatacttgtcattgctggctatacagcagagtgcagagttagcccttgcagacacacaaagataactcaaggcactgatttctgcatcttcagcctcctcatttcattaactattaaaattaattccctgtagagataatttgcatcaatcaacagaatagaagaattagaagagcttctgaggcttttctatgactaaaagagcaattcttttattgactaccataaacattagatttactaaaaggaaaaggtgttttaaattgaaccacccctctaatttattcatcttagttctgaaaacatgtaggtaagagttaatcatgttactgaatctaatttaaaaagtgagagggaaagtactgaatatttttcctctttgaaattacatgttgtttgcaatattagcctgcctgtatttttcatgtaaaccttttgtacattgaaaacaaattcaaaataaagaacgtttgttttcaggctcagaccttaagaactgatggtcttttcttttacttctacacaaaagtctaagcagttctgaagaaacactacagtgacattgggtcattgctaaaaaaaaaaaaaaaaaaaaaaaaaaaggttcacaaactatcaacattttaacaatctaatagttgattgttgtttcccaaattggtgattttgaatgattattttatgtagaatggaactgtgtctttttcttcattcatgcaacaaacatttcctgatggataccaagcaacggtgacaggtaagcatgccatcctagatcagtgttatataactcccaagcttcagtgaaggcctcatttttgttattacaaactgcctctctgggacctcatgaaggtactattcctgtttcgggaataggtctatccatccttgtctttttgtttcctgtcttgattctacaatctcccctttggccattaccatctcaaaatcctgcttcccaaggtaatccgtctagcttttctaatcttctggcttcccattactcatttcaattccttcttctggctccctgttgctttcctaaccaatttcaattacttatccttatcttgaaggccattcaccactctgccctgctgacgtgtttttcttatcacccaagattcctcccccggctcacacttctgcatgcaagcacgttcccaaagtatgaaaatgctttggatttatatcatgctgttgccttgaagagttttattctcttcctcatatcttctcagagaagaaagtaatttggctgtggttcaaaattcaccaaggcagtaaaatcttgtgttttgtacacaacttcctttctaatgacctctccctttcttcacctcacattgggcattcactcataactatttaagggccttctcttaggcggctgccctgttttcaggttgtgccctatgtggtcacaagtggctattcttaataaatcatagaatcgtagaatttaagtactgacagggatttcctatatataagaatccaacttcctactctgcagaaatccatctcagaacattctcaatgcttaaaattgccttttcgggagagaacatcaactcgtaagacaagctctttccttgttgcctaggactcatttttagaaaaatattctttgtaatgaattgtttccctgccacttcctccctttggtatgaggcatgttgccagaaagatacaaaataattctaataatctttcttagccttgataatgcaagagaatacagcaataatttcctccattaaaccttatttttttttttttttgaggttagatgcctaaattacttcaaggattcttcttgtggaagcatttttgagaattttcttgtctttctgcacctctgatttggtaacttgaccagcagacttcacaagaagcttgctgtcagtgttagtccaaacacaacctatcagttagtgtgtttagtcattaatatttaagagtgttttcataacctttaaattaataattagtcatctttattctttaatgactacagaagctcacattcatagtattttggtaactaaggtatccataggctcaaaaactcttcaaaattattgtgtaatgaaaatgttaaccatatttaagagagtgacttggaaaaaggccttgtttttcaatctcatattttgaagaactattgagatgtcactgaatagtatttttagaatttttgaattgctcacacatgagcacttggggaattggtcagtgaatatatctcctgagcactttgttccttgaaattatcaaatccttcttggaatttctttttctctctctcgtgatgtgtgggtgggactgggacattaccaacacaattagaacttcatttctttttcttcttagtgaaatttattttctaaaaggtttgtgtgtttcactctattagcagttctggaatcatccaagagtctaagtagatgtagcagagctcttatggaaactctggatatatacataatcacacagagaatttgtatttaattttagagttacatgtaccactggaatcacattcatatttctattacagtgtagtgattctgggttaagaatcactgatttagttctacctcattttacatataccttttcctgcaaagatatataaaaataaaatcatatgaataagttatgtgtttaatagttccattcagtcatctcataagacaaaattactttctaagttaattttaattcagatctttatagaatattgaggttttaaatgtgaacacatatatataattttatgatacaaccttttcttctgaatacttaaagtgttttcacagttggaagtatcaaaaactttgttctctgtaaaccttcagcttccawccttcttcagtcttatctgcagttatctcctgcacatgtaaatgatgtggtagaagatacggtttaagatgaattttagttatttaaagtgtgtcataacctgaacattttacagatatatttaaacaggtataggtatatttaaaatcactattttaattaaaaaaaaaaaaactttgaaaaatccctaatttcaaaaatatatttaaaatgtacatatatgaataatatatagagaaagataggaaatattaccatgaattatacagacctcagtttatctaaatttacagttttaaaataataatcttatccttattatctgaagatgtcattgatgatatgtttcatttttatatttggctttagtttaccaatattaacatataaattattaaacaattgtacaccagctttgtggtctctcctttgtcatgtgtgatttgtgtaatttgatgaacttgatgaaagcttccatttcaacttgaaggctgtgaatatgccagattatgtgcattttgtagtaaggattatggagctgaacaagtatgacagacttgttaaatatgttgtctacaaatttttttttgtttttgtttgagatagagtctctctctgtcacccaggctggagtgcagtggcgtgatctcggctcactgcaacctccacctcccgggttcaagcgattctcctgcctcagcctctcgagtagctgggactacaggctcgtgccaccatgatcagctaattttttgtagttttagtagagacagggtttcaccatgttagccaggatggtctcgatctcctgacctcatgatccgcctgccttggcctcccaaagtgctggaattacaggtgtgagctaccgcacccggcctattgtctacaaattttatcacttttggtaagaaatgcacaaagcctatcatgatgtcattgctagtttatatgtttgtgaattttaagccaaacaagcgttcaaaacgtttgccacaaatcgaggacctaaaacccagttttatatataaagatatttaaaaacatatttctggagaactatgcatatactaccaacacttacaaggcaaattaaattaaaaatgttgtataaggaatataatattttaaatttttagtgtaatcaagaaaaagatacattgttttatcaattgattaatttattggtcataggatttggcctatttatatttctgagtatccaacagaatcagtcccttaaaatgctgaatatcacaatttgcagttcggctaatacatttatatccattttattacttagttgtaatataaaggaagttacctcttcatatcccagggaaactatggtagttgacaaggagtgggtccaggctttataccaactgatgtcttatacaactcgaggagtcccttttaagagaaatggatacatcattggaatatgtattgaatgtggagattgaatatttatttaggatgtaaaactaaatcacaccagattataaaattaataaagctgacaaattctacaaggataacaaaatttataaaattaacttcattttcagaaaattaattgcttgatacatttctatgatttttttggctctgtagttttggttgcttattctctgattgcctcttcattttacatgattctattatgttttctatgttgagaataacaagataatgcagtcttttctctagtataattgattgtaatctgtcattttattaccgatagtttagaaaagttacatcaagtttctcaatttttgggggtgatttcatatacattcttaggactgtgaccaaacttgggaaatatctctatcaaatgtctttcatttgtgaactgtaagatttggaagaattttcaaagagcagttcctggctttatatgttttgaacattgtgtctccttcactccacacagacttgtggtgcctgaagctctgggcacattgattttggagtgatctctgggcttgcactttcatgttaccagcaccatggtaatcaggtgtgttcgtggaagctacacccagacagccagcaagaacctaagggtacagggaagagactgagaaccacaagaatataatcacaccaaactgaaactaaatgaatctttaactcagtttctaattagccagatcccaaaatggcccacagtcaccccagtgctaactaacccaagggaaaagtgtgatataggcaaaatcagtacgtagacattgatcttaaacttctgcagttaaaatgtctcactcatgcaaaattctaaaagcaaaggagcatgccatcccacccctcgagccttttccagtgccttaggaaggagcttgtgcaagtgaggggccctgaagcttcacccttcctagcctcacggtaaatccacctctgtggtagacagaaacatttctagaccacaggaaatctgtttgcctaaggaaacacagaagctgtccttacagttaaacagaaatagttctatttttttcctagagttcagcaccatttctcaaggggtatttcttagaagttcattttatgaagtctcctccacaagttctttttgatagccaataattcaaatgtcatgctacttctttaaatcactccagtcattgaatagcataatcttttcagggggcaaacagctgggctccagtaggctttaaatgttcatttgttttccaattttttgacttgcataggaagaagtaatccctttcatgtgaaatattcccctcgattaattttaaagaaccaatggcattgtctgataatgggatgaaagcccaattcactgaacagaatgtgctatttgtaacctggattatcctttaggtttttcggcatagtcctcgagaagctgagaatctgtcattttattgattaaaatacacgtacagatacacacgtttacattagaaataaaaatgttgtaagctcaaataggcagggtatttcacctgaaagcctgaaataaatgtgatgagaacctatgaactaagttccagtgtaaacaagtgggttaaattctcattatagaaacttccagtgagcaatgcagcatgactgtgggaccataattcaggaacaatctgcagagcaaaatatagaggcactaattttgttatatttgcagcccacatactgtaataccagatttgctcctgttgttctggccaaagatgagtcaggtacctctgatataaccattcctaaaagacaacaatggattcagaatgtgagactgagagaaatcctagaagtctgaccttcagatcagtttaactgtagatcaataatccattactcagaccaacacagtaccaaaaaatctcttcagctggctgccaaggtactattttatcttaaataagctggttgagagcagtcaatatagatacatttttcccactgacaatttgctgattcagagaacatgcaacatccagccacgaaatagataaagctcaggcctgccctgtagaatatggtcacctggctttcctgttctcctacaaatgtcctactggaagaatagcccttaatcccttaatgttcatctaaaccaaggcttgttctaaattctctagactctatctcatgcattattacatctctcttggcatacttctcttcttgaagtgcataacatttatataccttctacaaatgttggtattattgatattgagggagggggcagacccaggtctatggccttatgtattattagtgaattacaatttcttagagtaataggccaatgattaaagtcacatgttaggaaaactttaatccactagggaaaacttccaatatttttcaaagtaatttactacatttggatgcaaattatataggtgtttttggtggtatccatacttgctttcttgtcaacctgaagagatgtaaatgtaaatcgatgctaattgtaccgtgcttacacaaagagctaatttgagtaatatcctatcccatcagttcattttcaccatacatttttttctttacaaaattgtttttaaaactccactggaaaaaaatatataataaactacatgtaaattacacaatttagtaaattttgatataggtatacacatctgtgagaaaattaccaaaactgagatagtacacaaatatatatcacccccaaaagtttcctcgtgtctttgtcattccttcctccagctttttcccagaaatttcaccttcctcaggctgatcaacactcagctgaagactcaagagggggcctgtgcagatgtccctgagttccctctctgggccactgtctcctctcttttcagcaaattctagttaccttgacctccctgaattcccagctccatctcctcaacttagggagactttcaggtcaggcagtgatccctcctccttatgctgggacctggaagctctccagcatgtacactggggcaaccataggcgtcatctcattgtattcattttctctaatcaccatgctaagctaactgttgcctaaggtctgaaaactgttgtttcattcattttgtccagtttttccattctttcatgagcaagcataaacctgactcctttgggcaagaagcagaagtccctatagtgactttatttactttattgttattgtcagcatttggaaaaaaaaatgtagagattgactattttatactatttaagtaattttttgttatattgattttacctaaacaagagtttattagaagtattttgttatacagcttataacaaataattgtacaaaaattagaaaaatcagatgaacaaattttttataagacttctcgtggttatagaatgactctaacaccttgtagtgtattttttaggattttgttcttagtgcatgtgttagtctgttttcatgctgctgataaagacatacctgagactgggaagaaaaagaggtttaattggatttacagttccacatggccggggaggcctcagaatcatggtgggaggtgaaagacacttcttacatggtggcggcaagaaaaaatgaggaagatgcaaaagtggaaacccctgataaaaccatcagatcttgtgagacttattcaccaccacgagaatagtataggggaaacttcccccatgattcaaattatctcccaccgggtgtcccccacaacacatggaaattatgggagtataattcaagatgagatttgggtggggacacagagtcaaaccgtatcagtgtatatgtttagagggacatagaaaactatataagtttaataagaatatatacatattgttattaaatgaaaacatttgaaattataaaagtagtaaatattttttagtaaaattaaatatatatatagtaaaaagtgaaagctgttttacttccattcccagagaaaactttacttaaattttatatagttttttccagagttcttcctacacctgaaaaacacagtggattatttttgtgtacaaaagaaaagaaatcattctatatgtatctcctttacttccactctttttctttccacttaattcatacagataaactttaccatttaaatggcctctggtgattcctttataagaatgaaccattagatagttaaccagtttactaatgacagacatttatattgctcccaagttgttgccattgttcatttatttatttctttagtattaattcctagataagttgctacatcaaaaataatgtacatttaatattgcaatagttacaaggaaatctgtacttttttcagtaatatattagtgtctactttcaaaaagctttaaattctgagcatcatattgtcttctaaatctttgacaaaaattaatgtaaatgaatatgctattttaattgtcatttatttatttgattattagtaagatttagatttagatttcagtctttttattagccatttcagagggatgagcattctctgcctatggactttgcctggttttgtattgatgtgttcattgttttcttatttcctcatttgtaacatcattttaaagtgcttttatttctggacaatgtttttacattttttaagactcctattgtgatttttattaaaacaaagttagatytatagaaaagctggaaagaatttgaagttttaacgatattcgctctccctttccagaatatgtggcaaaggagggaaaagaagggattctgaaggaacacacgggaagtcggcagtgtgggagtgatggatatgttcattcccttgcttgtggtgatggtctcactggtgtatacatttgcagtaattgtcaagttgtacactttaaaatatgtgcagtttattttatctcagttacatctcaatgaaactttttttttaagtggcaccaaacatacattaaatagctttcagccaaaagtaaaaactgagtttggtcagaatatttttgtgctattttggttagatttcttctgtcacagttataatggctttctaaaataaaytaggaagccggagaaagtcactttaaccttcaagagtagggaaactgaacccataaaaaaagtgcttccaggtcagactcagcctaaaaaacctgaaaaataaatgtgacttctgagtagcagtatatgggaaaaattttctataaatctctgagaatgaagttgactggagactacacaagagacaaagagatatagaattgccttaaatctgaaccatggagttacagaatgataatggcattatgataaatttttagagaacactcttgataaacaggcacactcaaaaatagctttttgtttgttgttgttgttgtttgttttctgtgcaagaggtgacaattgaatgaggttccaaaaagtagtgtgggcttgcattgcacacatattatcaggcaggatttgtgcagtagagaaaggtgactgaagaatgtagtggaaggacatgctactggaagaagctgccaagtgacatacacagggctgtgagtcagccagggttgaggctctgtccagtgggacagcaggctctgtctccacagtggggactgcctgagagctgggtgctctggttcagccattgtagcacaaaggcacttgtataaatttccgtgaaatggcttgaaacctactttgccataagaatgagataaatttttaattcaaaacttaaaatatcttgattagaataaggaggaggaagagaaagaacaggcaataaaaagttatttattgattgattgacttaatgcagctagctgaagggtgagaggaagaactccggctccagagtctgaaagccagggctcaagtttcaatttgggcatttcccagctttgaacaacagaaaaacactgtttaccttttcagaacctcagtttccttagatctgtaaattagcaataaaaactaatgtgccttccaaggttatggtaaaaatcaaatatcttatgcctgtgtaaatctttttcaaaaaacaatagacactgcaaatattgggcattcttatgatgatgtttattcttcactgggagcattgatggattgattgttacttttcaataactttttccatatttgctctagttttaaatttgcaaattttaattcagtattgtttataataagacaaaagctcttctttaaggttggggcattaatgttaaaaaaaaaaaaagaactgttacatcaaatgtacatcaaatgcagtgactggacaacaaccaaagaaacttcctgtgtaatccccatcccatcacacacacacacacacacacacacacacacacacacacacacactatagacactatatttaaaattggcaggggtgatattatgaactcctgtaaaaccaaattgatttgtgtttgtcaggaatgtgtgggtctgtgtcctggaatgctatatatttccactgtgcactgcccattgaccatttctactaggatgccttgaaggcacctcagactcaacaagttcaatttgaaattcattatgtactccccagttgttcacgctaggagccttcaggccacccgtgacttttctctctccttgagtctctccttagcttcccatggatcagtctctgtaccatgttgattctaccttctgagtatcctttctgctctccctcatctgcacttctgttaccactgcctgagttttggttatgggcttcttagtcttttagtcttttctctcccccaacccagccatcgccaccagcaagaactatctttctaaagcaccaattatctttccaaaacagaagattttctcttctttgtaggaatttaactttagggcatagtcagataaattagccaaaatatatgtgaagaagctgttcatcacaatattgtttattatagtaaaaaaaggaaaaaaaccttaatatctcaaaaatggatcagtaatatcgagactatacacaatagtcattacattggtattatagatgtataataatttggaaatgatattataaaaaattattaaataatgtgcatagaaaaatttgtggaaaatgttttatgctataaaaatatttctaggtaatggaatttagtaagaatttttctcttcctacttcccaccaaacaaaagcaaaataaaactaaaatagaacaaaaattctgctatgtagccctttacaaaagatagtgcttctggcaagaaactgtgactgaccaaaatcctgcaattcagtacctgtgaaatgccatataacaaatttactcatatcctaaaagttatgagaactgggggcttcaggacatctcatacctgcctcattttttcaagaaaatttgttgtagaatcttttatataaaacactatacactgtccttaatccactatgtcctattccctctatttacaaatgtgctttgtccttacatttctttaaaaaaaaaacaacaaaaaactgtgttcacacgtatctttgtaggctaaagaaaagtgatactataaggattgggaggtagagggtgggggcactgaggaagccctgctgccctcaggttaagctccgtatctctctcatttaaggtccctgataggagttacttgttctcaaacatgtgtgttggctctttactgtcttttaagtagcatttatgatgaattccctttttttaatggtggtattacagtatctgatgttaggcatagaactgctcaggcagcaagtcaccttttctttttccccttttttgatagacttgagagaccaaggcagcacacacacactcctccaactagctttgcaatttgcatacatttcgattctggtggkctattcatcatttttatagaaatgcttttatgaaattcgatctcatggagtgagttaggagtttctttgttttttgctttatgataacccattgcctcagtaaatatcttaattattcccagaaaaaaataaacccaactgattagacctaatcccttctcaaatcactttactttctttgtcatttcctatccatcctctctctacactcagatgtctttgttttattatgaaatatatttggcatgagtaacaacattaagtaatatgaatcattttatttggttaaatgtctacactcaaagattagtggagaatttggaaaatataacgaaataatactggaacttttgatatttccctagctacttgccatattcaaaagatgtgtctttgaagtgaagagcagaatagtaccttattatagtccatattaaatcatatttatggctttcaacagaagtattgaaaaccagattcagttgctgcacccatcaactcatcatctacattaggtatttctccgaatgttatcccttcccttgmccccaaccccccgacaggccccagtgtgtgatgttcccctccctttgcccatatgttctcattgttcaactcccacttatgagtgagaacatgcggtgtttggttttcggttcctgtgttagtttgctaagaatgatggtttcaagcttcatccaagtccctgcaaaggacatgaactcatttttttttttttatgtctgcaaagtattccatggtgtatatgtgccacattttcttcatccagtctatcattgatgggtatttttgttggttccaagtctttgctattgtgaatagtcctgcaataaacatacacgtgcatgtgtctctatagtagaatgatttataatcctttgggattatatacccagtaatgggattgctgggtcaaatggtatttctacttctagatccttgagaaatcgccacactgtcttccacgatggttgaaccaatttacactcccaccaacagtgtaaaagcattcctatttctccacatcctttccagcatctattttttcctgactttttaatgatcgtcattctaactggtgtgagatggtatctcattgtagttttgatttgcatttctctaatgaccagtgatgatgagcttttttcatatgcttgttcatatgcataaatgtcttcttttgagaattgtctgtccatatccttcgtctgctttttgatggggttgtttgtttcttgtaaatttgtttaagttccttgtagattctggatattagacctttgtcagatggagactgcaaaacttttctctcattctctagcctgttcactctgatgatagtttcttttgctgtgcagaagctctttagtttagttagatcccatttgtcaattttggctttcgttgccattgcttttggtgttttagtcatgaactctttgcccatgcttatgtcctgaatggtattgcctaggttttcttctagggtttttatggttttaggtcttaagtttaagtctttaatccatcttgagttaatttttgtataaggtgtaaggaaggggtccagtttcagttttctgcatatggctagccagttttcccaacagcatttattaaatagggaatccattccccattgcttgtttttgtcaggtttgtcaaagatcagatggttgtagatgtgtggtgttgtttctgaggcctctgttctgttccattggtctatatacctgttttggtaccagtagcatgctgttgtggttactgtagccttatagtatagtttgaagtcaggtagcttgatgcttccagctttgttttttgtttgtttgtttgttttttcttttgcttaggattgtcttggcaatacgggctctcttttggttccatatgaaatttaaagtagttttttctaattctgtgaagaaagtcaatggtagcttgatgggaatagcattgaatctataaattactttggacagtgtggccattttcactatattgattcttcctatccatgagcatggaatgtttttccatttgtttgtgtcttctcttatttccttgggcagtggtttgtagttcaacttgaagaggtccttcacatcccttgtaagttgtattcgtaggtattttcttctytttgttgcaattgtgaatgggagtttgctcatgatttggctctctgtttgtctattatttgtgtataggaatgattgtgatttttgtacattgagtttttatcctgagactttgctgaagttgcttatcagcttaaggagtttttgggctgagacgatggggttttctaaatatacagtcatgtcatccgcaaagagagataatttaacatcctctcttcctatttgaatatattttatttctttctcttgcctgattgccctggccagaacttccaatactgtgttgaacaggagtggtgaaagagggcatccttgtcttgtgccagttttcaaagggaatacttccagcttttgcccattcagtatgttgttggctgtgggtttgtcataaatagctcttattatttcaagacatgttacatcaatacctattgagtgtttttagcatgaaggagtgttgaattttatcgaaggccttttctgcatctattgagttgatcatgtggtttttgtcattggtttcatttatgtgatgggttatgtttattgatttgcatatgttgaactagccttgcatcccagggatgaagccgacttgatcgtggtggataagctttttaatgcgttgctggatttggtttaccagtattttattgaggattttcacatcgatgttcatcaaggatatttggcctgagattttctttttttgttgtgtctctgccagcttttggtatcaggatgatgctggcctcataaaacgagttagggaggagtccctctttttctattgattggaatagtttcagaaggaacggtaccagctcctctttgtacctctggtagaatttggctgtgaattcatctggtcctgggctttttttggttggtaagttattaattactgcctcaatttcagaatttgttattggtctattcagggattccacttctttctggtttagtcttaggaaggtgtatgtgtccaggaatttatccatttcttctagattttctagtttatttgtgtagaggtgtttatagtattctctggtggtagtttgtatttctgtgggatcaatgatgatatcccctttatcattttttatttatkgtgtctatttgattcttctctcttttcttcttcattgatctggctagtggtctgttttgttaatcgtttcaaaaaaccagctcctggattcattgattttttcaaagggttttttctgtctctgtctccttcaattctgctctgatcttagttatttcttgccttctgctggcttttgaatgtgtttgcccttgcttctctagttcttttaattgtgatgttagggtgtcaattttagatctttcctgctttctcttgtgtgcatttagtgctataaatttccctctaaacactgctttagctgtgtcccagagattctggtacattgtatgtttgttcttattagtttcaaagaacttatttatttctgccttygtttcgttattcacccagtagtcattcaggagcaggttttttgattttccatgtagttgtgctgttttgagttagttcttaatcctgagttctaacttgattgcactgtggtctgagagactgtttgttatgatttctggttttttgcatttgctgaggagtgttttatttccaattatgtggtcaattttagaataagtgcaatgtggtgctgagaagaatgtatattctgttgatttgtggtggagagttctgtagatgtctattaggtccacttggtccagagcttagttcaagtcttgaatattcttgttaattttctgtctcgttcatctgtctgatattgacagtggggtgttaaagtctcccactagtattgtgtggaagtctaagtctctttgtaggtctctaggaacttgcattatgaatctgggtgctcttgtattgggtgcatatatatttcaggtagttagctcttcttgttgcattgaaccctttaccaatatgtaatgcccttctttgtctttttctrtcttttttggtttaaagtctgttttatcagagactaggattacaacaccttttttttttctttctgtttgtttggtaaatcttcctccatccctttatttttgagcctgtgtgtgtgtttgcacatgagatgagtctactraatacagcacattgatgggtcttgactctgtctagtttgccagcctgtgccatttaattggggcatttagctcatttacatttaaggttaatattgttatgtatgaatttgatcctgtcattatgatgctagctgtttattttgcccattagttgatgtagtttcttcatagtgtcagcggtctttacaatttaatatgtttttgcagtggctggtatcagtttttcctttccatatttagtgcttcctccaggagctcttgtaaggcaggcctggtggggacgaaatccctcaggatttgcttgtttgtaaaggattttgtttcttcttcaattatgaagcttagtttggctggatatgaaattctgggttgcaaattcttctctttaagaatgttgaatattggcccccactctcttctggcttgtagggtttctgcagagagatcagctgttagtctgatgggcttccctttgtgggtaacccaacctttctctctggctgcccttcacatgttttccttcatttcaaccttgatgaatctcacgattatgtgtcttggggttgctcttctcaaggagtatctttgtgaggttctctgtattttctgaatttgaatgttggcctgtcttgctaggttggggaagttctcctggaaaatatcctgaaaagtgttttccaacttggtttcattcttcccatctctttcaggtacactaatcacatgtaggtttggctttttacatagtcccatatttcttggaagcttttttcattccttttcattctttttttatctaatcttgtcttcatgctttatttcattaagttgatcttcaatctctgatatcctttcttccacttgatcagtttggctattgatactgtggtaagcttcacgatgttctcgtgctgtgttttttcaactccatcaggttatttatgttcttctctaaactggttattctagttagctattccactaaccttttatcaatgttcttagcttccttgcattaggttagaacatacttttttagcttggaggagtttgttattacccaccttctgaagcctatttctgtgaattgatctaactcattttctgtccagttttgttcccttgctggcgaggagttgtgatccttcggagaagaagaggcattctgttttttggaatttccatcctttttgcactggtttttcctcatcttcatggatttatctacctttgttctttgctgttggtgacctttagatggagtttttgtgtggtcatcttttttgttgatgttgatgctattgctttttgtttgttagttttccttctagcagtcagacccctcttctgcaggtttgctggaggtccactccacaccctgtttgcctgggtatcactagcagagcctgcagaacagcaaaaattgctccctgctccttcctctggaagcttcgtccaagaggggcacccaacagatgccagccagaactctcctgtatgaagtgtctgtcaacccctgctgggagtatctcccyatcgggaggcacaggggtcaggggccaacttgaggagggagtctgttccttagcagagcttaagggctgtgctgggaaatctgctgttctcttcagagctggcaggcaggaacatttaagtctgctgaagctgtgcccaaagccacccctccccccaggtgctctgtcccagggagatgggagttttatctgtaagcccctgactggggctgctacctttctttcagagataccctgctcagacaggaagaatctagagaggcagtctggctacagcaactttgtggagctgcggtgggctctgcccagtttgaacttcctggcagctttgtttacactgtgagggaaaaaccacctacttaagcctcagtaatggcggacacccctccccacaccaagctagagcatcccaggtcgacttcaggctgctatactggcagcaagaatttcaagccagtgtatcttagcttgctgggctctgtcagtgtgggattcactgagcaagaccccttggctccctggcttcagcccccttccaggggattgaatggctgtctcactggtgttccaggtgccattgggttatgaaaaaaaaactcctgcagctagctcaatgcctgcccaaacagccacccagttttgtgcttgaaacccagagcccttgtggtataggcacccaagagaatctcctgatctgtggctagtgaagaccgtgggaaaagcatagtatctgggctgggtagcttcgttcctcacggcacagtccctcatgacttcccttgggtagaggagggagttcccgagccccttgtgcttcccaggtggggagacgccccaccctgcttctgcttgccctctgtgggctgcacccactgtctaaccaggtccagtgagatgagctgggtacctcagttggaaatgctgaaatcacctgccttctgtgttgatctcactgggagctgcaggccggagctgtttctatttggccatctttattctcttacaattgaaaaataatgatcttaaaatttttgtctccacaaacaaaagcaagtaaattatctcagtaatatagttttaagaatagttgctcttttttaaytgttggcaggggcataagggataagagaagaaatagttaagaacacaggtgggttcaaatctactctctggcacttactagctggggaactttgggcaactcacctaaaccatttaagcactactagttgcctcttctggaagatggcagttgtaataatacataattgatagtgtcattatgagataaaatgacataatgcaaataaagttattggccatgtgcttggtacaaaataagtactcaaaaagtacttcaaagtaattttttattctaggagccattccttacaggtggaaaaattgtgccttttgcttacattttactttgcatttcacaagatgtcttcaagagtatgacctcattttatcccttccacaaatatgagacatagaaattgttagctacattttctagggaaaaaaaaccgagcgtcaggaatattaagtgactcagccaagggtctacacctcataattagcaggatcaagaccaatgaaagtgcctcttggtaagatcatacctgaagctaacagacacgtgcaggcctcctacaacataggtagccatgtttagtgtaggcagcagttggacttctgtatattcatttctggcactggagactgcttctattatagaagttgtgaccttgtcactcatcaagcagatggcattgcttgattagagtcaggccatatttagaacatttctataaagccattctcatttgggcaaacatttttgccaattgaagtgtttcttttcactaattgagcaaacaaatcatgggctatccactcacaagggctttccaccacccatattttcaggaaggcaggtgttgagcttatattttcagaatatatttccagcttcatacactcttaagagaacattgaagcctctttgatgaaggtgagggtctataaacatgcttgtattcattataaggggattgtgattgtcctcatagaaaaatgactttaagaaatagatgtatcctgaagcaagataatatgagtgtcaggctggacacgtaaaatacaagggaaggtagtggggaaaaggctgagaaaagagtactgtagactttacatcacaatgcttaaattaatctaaaatgtaagctataaaatagactaaaattatatatagacgtatgtgcgtatgtgtgcatatgcataaaagtgtatgtatctccatacttcaaaggctaatattcacagatagattcaacaatcaaatacggagttagttttgaaggaaaagccaaataagacacctttgctagactttaaaattttattttaactgaaactacggtatagacataaccatataaactaatctatttacttgtaaaattaattgtttcattgtcattgaatcagatgtgagtgtatttagataagtcaaggtagtaaaagagtataataagaaacactgagacccagggatcatgctaactcagacttctgtcttgagtctgccacataagagcaatatttcctcaggcaaattattttcatagttttgaacttgaaattctcatctgataaatggacacaccaatgcctaacacatagggtagctgtgaggattaaatgacatgcgcaatttgcatggcttcctcatcaagttgccacttgtattagtcggctagggctgctatagaaaataccacaagcttggtgccttaagcaacagaaatttattatctcaccgttctggaggctaggagtctgagatcaaggtgttggcagggttggttctttccgagggctgtgaggaaggatctgtttcaggtccttttcttagcttgtagatggccttctctctgtattttctcttcgtcttctctctgtacatgtctctgtgtccacatttcccttcatgtctctgtgtccaaatttctctttgtcttctctctgtacatgtctctgtgtccaaatttcccttttattacaaggacaccagtcacattgaagtagggtgcatcttactcctatatgacctcatcttaactaataacatctgcaaaaaccctatttccaatagggtcccattctagggtactgagaggttaggcttcaacattaattttgatagggggacacagtacaacccataacaacactcagaagtcactttctcagacagaccatgcttgaccactgatgtagtttggctgtgtccccaccaaaatatcctgaattgtagttcccataatccgcacgtgtagtgggagggaccaagtgggaggtaattgaatcatggtggcagttacactcatgctgttctcrtgatagtgagtgagttctcatgagatctgatggttttttaaggggctttcccttttttgtttggcacttctccttgctgctgctatgtgaagaaggacatgttagcttccccttccaccatggttgtaagtttcctgaggcttccccagccatgctgaactgtgagtcaattaaacctctttccattataaatcacccagtgtcaggtatgtctttattagtgggatgagaacggactaatacaactaccttttctaagaacagtcttaccctttcctagcacacacagtcccttgccctatataatatgccaaagtaaatcatagaatcatttattttcttattctttttctatcccccacactagtctgaagtccatggtgccagggccctacttgtcttggaggttgttctattctgggcttggagaacagtgcctggtacaaaatagatccttaacctctggcttgaggttagggctcaataagtaataggtggtataagtatctaaaaaagaatctcattctctatccaaattggtattcactagccatatgtgaaagaaactaaattttcaattttattttaataaatctaaatttaaatatccattagtggctattatattggacagcacagatatagaacatttctgctactgcaggaagttctatgggacatttctagacatagaagcatagatgaggatataatagtgataattcagttcagacccggtgctgcctgccaaattccacaacactgccctgcattgctgccctctcatgacaccacacagctcccagttgatttgttcttctttatggtaccaggtgtattgggtgtattgcaagcattttcttcttccattattaagttaaaaataccccttgaagttttgaaaagctgtaaaggggttgtcttgagagtcccattaacatttatagtgaattctgtggcagcaattttttattttaattgttgttgtctttgctattcagataagtaagcagtaggcatrgataattaatgtacagattctgttttacacaactttaagaatgactctttgagaaacatgtctttaaggacaatgaactgagatatcccttacttgaggataaaatatgggtgcaggtacaaggagtcagcaggtgtcacgtgtgggctcatttcttccctcaaccctggaaagtatatagattctcaccatccttgttcagcctctgccttagggataagcagtgctggggtgattttatgctcagraagtaaccaaaggctagcaaacatctctcattgttggcagtaaaaaccattgctatgaataacaatctatattttataaaactattttggcttcacataaaaatctgatgcttcaaggaacatactccaatgtgccttgaagtatagcacatactccaatgtgttactgaatcctgaaccacacccctaaaggaggcattcattgatatcactggcttaacaaaaggctttggggtggggtgaagggataatacataatgcagttagaaagtgatagaaagcatattgcttatataaaattcagtgctaggtaagaataaaatatgaaatacatgtggcaatgaacttagaatatgctccagttttggaaaaagaatagtaagataaaaccctagaatttggaacatttttaaataacctctattactatcattttaatctttgaacagtgacaaaatatcccacctgctttgtgacttttctgaaaagaatacatggtcacagggtattctctattggaataccattcacaccttcaaacttatcaccatccagttaaatttgaggaatggtaattgatgaccttaagtgagtcaagtcacaattacctgaagaactaaaaatgctactggaaggactagactctaagttggtacctaactaattcttattgcctgaatgtggttgtagagtagacccttcattaggaagtgaataggggaagtatgaaaaattaaatgtgtacaaaatccaaagcttcctgataggtcttttgggctattttgaagaataagacaaacaacagaagcattataattggaggattatagagccaacaaaggcaaagtaggagcatatttatcagacataataaagacagaaattaaagatcttatttatgtttgaggcataggaagcaatagaagcatatatatttgcaaggtctagacatgcctctattcatcaatgcattttagtattttagctcagcgttcattaaagttattaccttaatttatttaatcaaaatattgactctattctcatactgcaaataacttgttacatgatttggatgttaatatgatttttttaccactgaaagttaaactaatgctcatcctttcactattaaaatattaatgtcttctattttagtttagcatttaaaaaacaaatttgtagagatgggatctcactgttataaaaaagctttccatttttgtaaactgcaaacttgcagttagcttaactaaaattacataatagaatttccaaattaagaaattaagtcactcatttgttctgtaaagcagtcacccttgaataaagaaatscatggttcaacatattttttaagaattcaatagtactttcagctttattgggatataactgacaaattgaaattgtatatattttcagtgaacaacttgatgttttgatatacacataaactttatgaaatgaccattaccatggttccatataaccattgtgtttaaaccatctaattctcttgttgactttcatttaaatgtttgatgtatagaaacctcatttcattaaatacttcagaggccaactgttattttatagaatccaacaaacattactttaatgttaacggaccctaaaatggaaaccaggcattggttttttttattttgttttgttttgtttttttgagacggagtctcactctttcacccaggctggagtacagtggcacaatctgggctcactgcaagctccgcctcctgggttcatgccattctcctgcctcagccacccaagtagctgggactacaggcgcccgccaccacgcctggccaattttttgtatttttgtttttttagtagagacggggtttcaccgtgttagctaggatggtctcaatctcctgatcttgtgatccrcccgcctcagcctcccaaagtgctgggattacaggcatgagccaccgcgcccagtcattggtttgtaatgccataaagaatccatgaataatatagtcgtgtatttatttttgaaagagaatgttcttttaataaagcatatgttttctaatttacacttgagcaaacctttattttaaagaaaaattgagaaatttatgtttcagagttatgagacaccgtcttcttatctaagatatgaaggatgcagcaataaattatccagatgttttggctatagtctttttttattgttgagtaacaaatttccatacacttagcaacttaaaacaatatccttttttttttttaatgtcgcagctctttaggtcagaaattcaggataacagggctggtttatgtgctcagagtctcaaactcaaggctgaaattaaggtgctaaccagctgtgatcttatctggaatcaaggtcatctctcaagatcattactgccactgttggaagaattcagtttcttgcaattataggatagaaatccctcttcttttgctagctgttggctgtagccccctgtgaccttctagaggccactcttggattcttatcccattggtcatcttcatctcagccgtggaagacctcccctctcacacttcatctctctgacttccttttttgcttctagctaaagaaagcactctgcttttataggttttataggactcatgtgattagattagacccaccctgataatcttatcttaaggtcagctgattagtaaccttaattgcatctacaaaaattcctttttccatgtaaagtaatataaccgtggagtaacaccagggctgagggtaataggagtcatcttagaattgtgtattagccaagatgtggaattcctatcaataaatttaagcagtgtttccattatatttgaaaaggagagaagattagggtggctgatcatcttgtatttaaatgctaagaaagacaataatcacagccaaraagcttggtcacatgttgactttttaggaactcaattatagcaatcagaattgatagaggcagaaatcatactgcaaaggcttaaaggaatgctaagagttctaccatttgagaaataaagaactaccaggcaaaatgaagaaataaccatgtaattgaaaaactgccagaaataattcttaattagatgtagaccaaatgtctcaatagttggataacaaggcagaggccacataattcctctgtgcatcagtctgctcagacattctcatccattgcagattaaagccgagtactaccacgtttgtgccacagcgtctctgtggcctcctccctgatggctgcctgggaacatgttcctcactgcatcacactgcccttcccagtctctcaggaagcttaaaggggtaaagcaaagggaggagactgaaaaaaaaatgacaaattcgggagaagatcttttaactttctgttcattaagtgagaatttgtagatagagtggaaagaaccattgtgatcaggggcaggagtatgtgaaggaaaggagggatagactgaagatgtcagagacagagaaggccccaaaggatggaacaggggatggaattaggagaaacgtcctgaaggatagaatggggatagaattaagagcgtgcatggatccatttagtctggaaagtgaaaatcttatttttctgaaatacaggaaaagaacagaaaatgagtagtggtttcaaatgagggagaaaaagcaattacatgtaagaaggcttctatcctctcaacacaacggggctgctttatatatattttctcttctgtaaagtgataaaaaatagtaaggccaaataatatttatgatagttaactgatatgatgcatataaactgcttagagtagcatataccacattataaatgcacagaaatgttagctattttttactatcattgccattattattttctattgacagtaaaggaaagtgaggtaatgttgtgaatttaaaagtaacataaagcttttcaatcacttgttaaaaatagcattgcagagaaacattgaaccctccttaaatgtaaatagcacgattcatygaacatctagtcaagatgactaatctttttttctagtaacgctcaacagtctagaaggtacagaaggcggtgggtatcaaggtttataaaaggtcaggaattggaactctggggacctggttgttctcatgagggcacataccaagatcagggtgagctaggaagtttaagtgataggaagataatagatttatttagagaggggaaattgagacagtttcaagcctcggagatggaacagaacaacagagctccaagcactgggatgcagggctggaggtgaccaagtccacgactttgtctttctaaagtgaagtggaggtgagtctgaagaaattatcactgtgattaaggttgttattgagggcaacagggcaagctagcttaggaagaaaaagtttggcctaggtrtaagatgtagttgtctaatattgaacagcacagattttagaacattagcatcaccacagaaaattcgattgaacagcactgtactagaggtacaggaaagtgagagggtagggtcttacagaaaatgttggagcagaagaaactatgccaaatgaggatgtgagcaaggatattctgtatttttgacaattttgaagcattatttattattttaacgtttctgaaatttggatgagtcatgcaattgatgtgctcatttaataaggttagtgtttatttttgtcctgaaaaaccattaagcaattaataatgcatctcacaatcagtgtcatcataatatcaatgaaatatggtaagagcaaggccaaaggaagggttttcttactgggtggtgatcacaacgataaagaatcaggacaaaaagactgaagagatgtggtgataatgggatatgagctgagttggaaaagaactagccccaagatattagtcagcactttggaggggtgatgaatttgccatggtttaaagtacttctttgagtttacagcacccgactctgtgttctcagaccttatgttgtttgagaattgggctgatggtgagtgtcaggagaatgatgtcagtcattctaaaatagtctcccaggtgctgatgcgctttggcaactacagtaggtcttccttaagattgggcatggaagagacaaatgtcggagaaaaatacccctcttgttttgagtggagaaaatcagaagaaagggagagagatcggggtgtgccgaaagcaaagccaatgtgatcatcaagataataatagccatacattaaggtagtcaagatcatagacttgagatctgaacttggatggagatgatgaactacacagttttagtctcatcaaaaagtcagctacatcagatggaactgaagttgtttgttttgttttactttttgatgctgtaataactctggcatgacttttcacagcaaattagaattaagaccttttaaatttgtcccaaatggttattgatacctgcaataatacttttccccctggaattatattttcctcttaaaatatatgtgtgtatgcatacattcgtatatatagtgtgtgggtatgtgtttgtgtgcatatgtgtgtgcatatatatatataaagaaaatagtgtagcggaaagaactctgttttctaagtcaaaatatctgattttgaacttggggtccagtgagccacttaatttcaggtttaacttctggcaagttttatcttctgaagccagaagtcattttcttttaaaaagaggcaatacttgtaactcttttaaagatcagatgacataaaagatatgaaaatataaactataacgtataaatatactgaactgtaaagtcatacaaatttaagtcattaatgttactgattggagttcatttctcagatttcacatagttgttgggcacagaaaatttggaaactttggctttcattcttgcacagactaatttagcatcatattcttgttctttgctgatttatcaggtaaggaaaaagtcaagtaaaatgatttggatgcctcactgccagggaatgcttgataaattaaaagcctggcttcctagggacattctgactactgttgtttataaccaagatcttttgcaaccttagacttcccaggaaaagcctgggctttgttgctgcaggaaggagaacagggaggaaaatatctttcagatttaatcagtgagaaactactaggaattagccactatgctagggaatacccaatcattattttgatacttttgtaagctgaagcatcatttaggggcctagcaggtttgctttctgatcatattcaaagccttcacctgggtgaactcctgtgagaacctataattcagggatgctaaagtcaccatggtgacaagaagaactcagctggcttcctattcaatgcatctcagatgaaggtgctcactccaggaaacataaaggatatccattaatttttagctttttttgtgtgaagcaaagggtattgctaatatacaacctctggaatagacctgatcagttacccagtctctggaagagggtggtaattgaaaaactaataagggcaggccctagtctaagaaactaaatctaagacagccacctgaagtgtgaagatggaaattgcagagttgagtctggagtgttttataggcttatagctctaacttgcctaattgaacttttacaattgaacttttacaaagaaagtggggatttatttatactcctactctagggggccacaaaaaaaaaagaggaaatgagagtataggagatttctctaggttatcataagaaagaagtctgacaatacaatccttgttccatttatctttttataataaaccacaaaatatttaagagctgttggaattctttgtttcttccccatgctggctattttgccattctcttcatctcaatactttgctgagtaaaagtcttgaaaccaaaaatatccctacaattcatgaccttgagtgacttcaaaattcagttagacaaaacagacagctgagttctgtggttctcaatctttgtacttttaaaagtattcatgctttggttctacccacaaagatcctgatttcactggggctgaagtgttgaaagattttatagccaccaaatcaccctaatgtgcaatcaagggtgagaaccttattttctcatatcccccttccttatatccactgatcttgacttcagttttaccttggcaattcacctccatggccacactctgaactttgtcatcagccagaactgctccaaccaacctcaaaatcttaaactcaaatatcccacactctaagcatagttttctttctttctagctcctcttattacgttaaagacctaatagtcttatttctcaactgctttcttgctaacccttcattgttctcctcataaacccaaacaggagataacaagccaggattaatccacctgtgtgatctccccatttttaacccttgtgtttccagagaaaaacacaaccacttacactggtgccacagcaagttcatactctccagacccaattggatggagcctcaatactgccaaaatcccattcatttctctagtcagccttgtgtccttttttcccaataaaaactctgtctcttggtcacatggacatttccatcctatttctgtttgaggtagaaatctgctcctgtaccttgagtcccacctgcttctgccttttcagttgacttgctccttcacctgccacttgtcttggatcaccagctttagccatggactaagtctttaacatgggyatttaaacatacttaaaacacttccttcaaaaagcaaagcataacagtgctaaagcaaattttcatgggtcctcctctgcctactgccttcctccctctaacagccaaataattttgcatctactctcaattttgcactttcctacaccaaatatactgacatttttagtgctaaatccaggaaattttttcttagtctttgttttactcagattctcttcagtatttgaagagtgtaggccactctctgtgcataaaacagtctattcctccatgggctcctagctaacagcctgcagtttgtcagttttctttggggtttcttgatcctctgcctaccactgaaatggcagtgttctttygtcagcactttctgctgttaccccatattccagaggtatttagccatggctatgcatcagaatcacctgcaaagccttttaaaatgcagccatccgcttgctatgctcgatcatctgaatcagaattactagggattggggcccaggcacctaagttattcagaaattccacagatgattgtgatatgctggtggtcttcttcacatccatgccttctcaggcattccctttatcagtctttcatctggatatcctagaccctaggcttatattttagatatgtctgcacaagatgtccaaactcactgatgtgtccaagagagcctccttgcctccattcccttcccatctcatccaatctgctctaccacctcccccttttctcctcccccatatttcagtctgaatgagtgacatcagattttattaaattgtacaagccagaaacttgataatcattttgaattgttttatttatccctcatgtccaatcaattgtcaagttatatcagtttcacctctagtattctccaaagttttttatatacatgggtattactttaggttaagctaagtcagtctgtgttgctataacaaaatacctaaaactgggtaatttataatgaacagaaactcatttcttacagtctggaagctggaaagtccaatatcaacgtgccagcatcttgcgagggctttcttgttgtgacatcatatggcggaaagtgagagggcaggagagagcaagaagggactgaacttgcccttataagggcaccaatgcctcccatgagggtggagccctcatgacctaattacctcttaaaggtcccacctcttaatactgttacaatgactattaaatttcaatatgagttttggaaggggagaaacattcaaaccatagcagccaccatcatctgtcttctgaaatattaccaccacctcctgactgtatcctctgtgtttggctttgcttactcccactaatctgtttttcacacaatgctcagaacatttttttctagaggataaatatgataatatatatttcctgcttaagacttttcagtgactatctgttgctttcagaatagaggccaagctgtaacatggcatatatggcccatcagaacccgacgcctgttctgttcttttgtcaggtcctctctttcattctgcacacagttttcatcacaattctctggcgttcatgattctctcttgtctctgagcctttgtttctttgctgtttttgcctagaacaccctcttcctcttggctcaggtcttacatcttccattcctgtcaaggtaactcctcctcatgttccagctcatatctgatatatcatcttttaaaaggatgtctgcctaaacctgtagaatgggcttaagagggcttcctgtttattctcatactgtgtacaatgaaaatctactcattgatttacttctctctcccacccaactttatgttcctttaacatagaaacttttaggcatcgaagaattcttttttttacatgacacataaactctcaatgattgttgaaggaatgaaatgaggagtattcagaactgttagtaaaaaaaaaaatcrgaaaataatgatcaagagaggctttataaagggaaagtcagtagttgaaaagctagaagtagaatgagctgactgacttgaaaagaggccactacttagtgaaaagcacttcattggtatggtaggagttgaagtcagaatgcagaaaattgaggaatgagtggtgtatgagttttctgctgaaacaaagtactagaaacagagtggtttaaacagaaatgtgttgtctcacagttatggaggtgagaattctacgatcgaggtgttggcagggccatgctccctgtaaaggagctagggaaggaactgttccagttctctcttgtagcttctggtagttcctttgcttgtagcagcatccatccagtcttcacatagtgttccttctgtgtacgtgtttgtctcttcacatggtgttctttttataaaggcgtgaggcacactggattagggacctactctcttgcaatatgtcctcatcttcacttaatgaatcatacctgcaacaatcctatttccagtaaggtcacattctcacgtacgaggagttaggacttcaacacatgatttctgggggagacgcaataaagtgttggacttgggtttattcgtggtgctattattgtcatacattcatagatcaatattagcttttaatctcttattttagagtccacattgtagcataatatttactgtggttgccatggaagagaagttagtaaatgactttcactatacagggctaccacactggtttccaaattgagctcttcaaggttgaagatggaggacgatggagctcctccaccacagcaccctctctttgcctaatttacccataagcaaagcaaggtttgaaatccacctatctaaaataagacttttagacatgttggaggatatatttttagtcataatgttgatagcaaataagaagagaagatacaccctcagcaattggagacaagaaaatctgatgcataatttaaaagaagaaaacgacaaaaagtacgaaatcttatgtgcacttattacctaatactttaaaatcttggagatatatatatatatatatatatatatatgtaattattaggtctaagtaatacacaaagttaaacccttcactatcttagttggaatacgtatagaggtatagatatatatagatatcctttcccacacttattttagctcttgaaatgcatagaataggaaaaaaatcagaattataatctccatgggagcaactttataccaaaaaacacagaagcaattatatttgaaacctgctagagtacaaaattctagattatctttagcagtttacttttattttcatggataaaatttgaaaagacaagggccagtgactcattctaccatttgagagcatcgctagggagcatgacattatcacagagacagatatatggtgacttggaaattttttgtaggtaattcctattcttaaacttaatatgagttgccaatttggaacactgctacattatatttatcacagagttataacttttaatggtttgagggatcatagatctgaccacatcaatatttggctcattttcaaaatagaaagtgctgaaacaccaaaatactgagctgaattctttaaaactttaaagctgaaaaaccactcatgtacataaagtgaaataagaatcaacctagtgtaaatggctgcatttttgaaattccattgtaaatcttaataaaaaatattgttttaaaaagccagcatgtttggaaatgggtgtaatttgcattaaaatcagatgagattatttcttggttttactactaagacacatggacacaggaaggggaacatcacacaccagggcctgttgtggggtgggggaaggggggagggatagcattaggagatatacctagtgttaaatgacgagttaatgggtgcagcacaccaacatggcacatgtatacatatgtaactaacctgcacattgtgcacatgtaccctaaaacttaaagtataattgaaaaaaaaaaagacagattgtggatgcttatggaaaatacgtttactttttctagactcctagaaggccattttgaggacttctgtaataattcactaaatagatagaaaactgcctagacctatacttcgctgtaagatagtcctcttttggtctaaccctcatttctatttagctaactagctagtcaggagtgtaaggtaggcagtataaagaattttaaacttactagggtcacattcaaagtaagcctagagtaaaatcaggagatcagattaccccagctactgagactgaaatgtgaactgtattgttgaagagcttttcttcctcacaattgaagaagacataaagactggtgatataagagcaaatgcagacacttttggtcactgttagcttgttttgaatgtgctgactgtgtctgtgtccatcttgaaaatattgaggagtcagcaaaacatatttgactctttacccactttttcttaaatgtttcatagtcatgagtatttcgtgggggaatttaatctatgtgcctatgattcatttacactagtctcatcaaaatggcatagggagatattgaatggctaagaatccttaaagtttaagaggccatttaaggcttttatctctgaaccagaaagtcatagtgtaccaggactactcccaattcaaacataccagggttcaattttgttttgtctaatatatcccaggaaaccttactgtttgattcatgatttctaacctcaaaatgctggtctaacatatgtatatatatattaatgaagtccaggtaagaagcgcatggctagaatgggaatgttcaacataaaaatatcccagccaggcgtggtggctcatgcctgtaatcccagcagtttgggaggtcgaggcctgcagatcgcttgagctcaagagtttgagaccagcctgagcaacatggcaaaaccctgtctctacaaaaaatacaaaaattagctgggtgtggtagtgcgtgcctgtagtctcagctactcaggaggctgaggcctgagaattgcttgagcctgagaggtggaggttgcagaaccgagactgtgccactgcactcaggtctagatgatagagagagaccctaccaccaaaaaaaaaaaaaaatgaaagccacattttgaataactaaatttgaatatcagcacagttgcctgaggatgtatcaatttacagataaatgccttcctaccaactgaagaataactagtgctttaaaacttttcatccattaaaggaaagtcacactgaattactccgttggtgttgtgcgatattctatagtttttaaaatgctttaaaatacataatcttgtctgattaggtaaacaggattggtattctctccatttctaaaaggggaaaatacaattacatagaagtttgtatattgttgctttatgtgtagtaacatagactcttacagttctgagctatgattgtatgcaataatagaagcaatgctgcacatatctcatatagctctattttatttttaaattcacttttctcatacttgtaagaaatctttgactttggttttagttaaaagataaaacaaaatcataatttctatgataatacaaagcttgaatattatcattggcataaaattcagttctaatttttctccaaaataagatgcttactccaatataattatcttccttcttaattttacatatttgcattttaaagtggcctattcctatggggctaatgtcagagcagagtgttctttgaactcaatgtgtgctccccagtcaggtcaagtccagtcagggcagtgactaagaaatgggtcagaacttacttaaattatgcagttgcctggaaaaaagttcaacttatataatatatgggaatatgtgaatggagaatggcttcccccttaatgtgtaaactgtaactcaaaatatttttttgagttatagaaaaatttttttgtaaaaaaattaagaaaaaagttttttttaaaaattgagccaaatattaagataatcttcatggtgaagcattactaaattaatttaacggcagtcttaatgtaatgtaattttggtttactgatatgtaatcagttaatcttgaagatttcataagttctggcatttgttctttcctcttgtttctctcttataaattggtcaattctccaaaatatgcaaattaaatttaatgttaacctatgtgtaagtcaaggcatgtgaatcccatgaccaaataaatattacaaagcaggtgtctctacactgatgctgaatacctaccatttagagaagacaactctcttccccagggtctcaaggcatctcattcccctggctttcccccttttcccttgaggactctgcatcctcctttgctgcatcctcctcagctttccaaagtcttagcatggacatgtcccaagcttagtccttgcagtcttctgtcctccttctgcgtatctcttacacctcatctaatcacaagacttcaaagtctatatgccattgtttgtcaagtctctaccgatctggatctctcacctgatacagactttcatattcaactgccttcctgtcatttccaccatgatgtctcctctatacctgaaactgagcatgtccaaaaccaaagtattgctctttcccagcaaacttgctcctcctggagccttcctgatctcagaccaaactttgttgttgtctttgactctttttttcctcacactcccaattccaatccaatcagcaaatccagccagcattctttcaaaatataacccagaatttgcccatttctcaccatcaccatggcaaccagcttggttccggccaccaactttcccacctgtgttgctgcaccacctcctgaccagtgtccctgcttcagcctgttttgcacccctcagcagagtgaggctgctccagtctaggtggcattaggtcacttctttgctcagaatacttcagtaacttctgattttcctcaaaatgaaattgaaggtctttataataatctactattttttcctgtggcctctcagattcagctcctactcctcctcctctggtccagtcactctggtctccttccattcccacaactatccaagcaaagtcctgcttcaggtacttcatgttctcaagtccttcagccagaacttgcatcagcctgatatgccattgttttctttcctcacctctttccatcctttatttggatatcttcagagtgaggctatccttttattttgtttttaataattatatcttcaccatgcctgttcctggcattccccatcccctcttctttttaaattgttctccctgcaaactgttatcatataatccttatatagatttcactttttctttttgtttatttttcatctctcctaccacgactcaagagccctagttatttcatagttcactgctatatccctggcctttagagttgttcttagcatatggtggcagtcaataaaaatttgttgaatagataaataattactgtctatcttcctctccttaggtagaagcaggctatataaaatataaattattggattgtcagacttgcccatatttatattcaaatacgataatccaacttggttgttggaatctgtaaaaaaaaaaattagaacatccatttttaaaagattgaacaagcagtaatttttttccaaatctaaaacaaacaaacaaacaaaaaaaaaaacagtgtcaatcaaggaatcagaatatatattgaattaattgtttttaggtcattagtgaacttgactgtgctgttgctctcaaagcactaaaaatagctgatatcaaaccaaaggtccttcatgatccttgaaacttccttgcagttctaaagaaaaactcaagcttataggaagaagttttaatgagacattgtgctgttcaggagagacaaaatcatagtttctgacctcaggggcattgataaaataagagagcagaagctctagggaaattagtttttaggaagtggaatccggtggctcattgcacattctaaatagcatcagagtaagaatgacagtctggctgattggctttagtgatgtggatagatttggctgctatattatcaaaactggattgaaatccctcaatatcaatgaagttttacaaaggtataaggactactgggccacagttcattctaggacttcatttaagtgacaaagtaaggtgggccaaagtgagattgggacaataagctaagtaatcttaaatttgttcttgtgtctatcctgatttgatcaatccacaaatattaatatttatggaacatttactgtgtaccaggcactgtgctagggagattgtgtaacagtgaccacagcagatgtaaaccctgcccttaagaagtttgtatcctagtgtggagacgggcattcagacagataaatgaatatacaagtgcaggttgtgatgagtgttacaaggggaaatacaagggtgctaggggagagaacatgagccatatgggttaaaccagggctatcatctgactgcttgtgtcctcccaaaattcttgttttgaaatcctcacccccaatatcatggtattaggaagtggggctttgggaggtcattaagtcatgagggcagggttcttacaaatgggattagtgcccttatgaaagaagcctagatccttttccccttgagccttgtgagcttgcagtgaatagatagttgtccatcaacaaggaagtaaaccatcaccagatatccaatctgctgatgccttcatcttggacttcttagcttctaggactgtcagcaataaatttctgctatttctaatctactcaggtattttgttatagcagcctgaatggactaagacaaccaggttgtcattaaaatctaccctgaaggttcagtacgaatccatgatgtatttgaataagatttgtatgtgaatcctctgtaaggacatccagatttgtggtctagatcccatttcttcccactttctaagagaccttgtacccctagcccctgtttctttctgccagcattttctgtttttctccactgactccttaccttctgccattatcaagttttacctattttgaaatataaatatcacatttaattattctccatagccttacagacttcatgtcttcaccactcaaaacctcatgtagtctccttttccccctcgtttacttattgtttcattgaggtgtatttcaatgggtttgaggcatgatcccatccaaaggactaatgtgcatatactcaaaatgttaattcagctgaactgctcacatctttgcttcattgcccatgtctttttgcactgaattgtaagccactaagctttgaatcaatgaacattttaaaatgttatttgtatagtgtctaaaaacatgtggcagttgagaatagattaatctgttctagaccaaaataagatcctggtgaagaggattttaaattcttgagttgaaagctgatcaaggtggaaccatataatgccacatgatacagtgtgatgtcagatagattattgtaacaaacacataattaattagtaatgaagtaatagggttttagatgtttaatcttcaagctggtagatataaattaggtcacattaaaatcagttctccagtctcaatagctctatgctcatattctccagcataaacctcagtaactcacacaacctctttcacttagcatctctgagactctggggggtgccttgcaattgcccctgcatggatctgcccaggatgtcactttgtactggtctctgctctaccagtgaccttgacccatgttcattagtctcttgattgcctaacggcagacaccaaccagtttgttccagctatgaatgttctctgttgtatctagggcagtaccagaacactattcacctgcagagtagaaaggagagtacatctcccttcttgctctctcaggggaagccaacagctgtgctgcttctggagctctcaaattctaggaatctagtgaaaaaagttctttcagttctccacacaactctttgtatttccgggatatgattaggagagttcatatgccagtcaccacaatctgccaagaaccactacacctttcaggaagctcagagtttgtggctgaggttcgggttattcataccagattccttttttctgtagagtgaattcttagtcagagacccattttctgttttagtgagaatgggctacaggaacaacaccaaaagctcagttgcttagaagagtagaggcttatttctcactcaagctacatgttcatgacaggtttgtggtggagggagagggttctgctcttcacttaggaacacagttaatgggagacaccacagtcgggaaagttcccagtcattgtggcagaagacagggcacttcatacacagacctcagtggtttcccccagaagtgacacgtattgcttctgctcacatatcttttttcttttttgtcttgtttcatcaaatcatagtgatattcagattaactacatatatatatgtgtgtgtgtgtgtgtgtgtgtacatatacaaattagagagatatacgtgtttctcatgctgctcacattttatttgccaaagtaaggttaccatgcctaacttcaaaggggcaagaaagtgcaatcttgccatgtgccttaaagagggagaactgagaatggtgacgaatagcaccaatgatgagtacaccttcttccttgaagttttgcatctatatccttctacttcccatccaatcctgccttttatgacatatctctctacatatgatcttcaatcatgtaaattgctcagtatttctctatattaattagtggttctggctaagggtctctcacgagttgttggcttgggctacagtcatctcaaggctcagctgcttcctcagtgactcatatagttgttggaaagcctcaactccttgccatgtgggcctctctatagggctaaccacagtattatagcttgtatcccccagagtgagagatgagagagacagataggcagacagagacggagacaaaagacagagacatcccaagacagaagtcaaacacagtctttcataatctcttcttgaaagtgacatgtcatcactgctgtctgataaccaatcctgggatagagtgggagggggactctacaaagatgtatgttaaatgccaggaggtgggagacttcatggaagctggctgccactctcattcaagaaggctacttactcttatgtaaatcttggctgccaaaaattgctgtctaaatcatagcttcttccaagtagcatacccaggacagggtaaatgcaatttaaaacttctctcaagggggttacttcatttagactagtgttggtgttctcctatgcaattaaatggttcttgtgtcttatcattttcaatgtccaatatccaaggaaatacatgcactcatccacagaatattttctttatttttaaagttttaatgctgtttttaagtcccttgtgtttaggtggttgttatacttgaaatgttagcagacataatacacagcaaataaattcttgatggttttgcttatcctcttctctagaagcatgcgctgtgtgagctaagtgtgactttaaataggacatagggaggaattagaaatagaggcaaagtggcagaaaccccacattaaaatccatccttgtcagcactctctgatttcacataccagggttcttttcggattaatcaaaaaattgttgaaacgtgttaaaggagaaatgcaattctgtaaggggaacacagttcctatttggagggaaggaatatgtatggccactataataacaaattaggggaaggcatgtgtgaatttttatgcactcatcgtcctattgagcacaagtagagaggtttattttcttttcttcattaattgttcttacagaaataaaccacactgtgtaggaaactaggcactcttccctacctactcctgctattgaaagagccttatctatggaaatcctcaaatcagcttcttcttattgtaccagtgatgtctcttggattaattcagacaaactgtgcagtgtaaccaatgcagacagtatgttagaagcgcatggatagcttgcttccttttcattccttcttccttcctttattgtttccgcattgtggttccttgtatcctaccatcttgaatctcttgtacctctaattatagtatgctcactatatgcaaggtttctcctcccacctaccccctgctgcctcctctactgacatctcacttcattcccaagaaaaacattgccctcccctccaagctcactgtgtttgcatttctctgctcttttccgctctcctccttggcatgctggtttaatcaattttaccaaatgactttcctggcagctgtaaaaagaaaaccccagagcaagttaatagcaatctaatactgcactttctgtcatttctctaaaacgtacagaactatttggtcattggattgatttttaatgatctaaatgatcagatgtttcaacgctgcactgcagcagcctgataataaataggaaaggggaggggcatggatgctgggcactcagtcagtgctagatgaataatcctaaaacagcagccaaggagacaagataaaatgtcagcctttgccaaatcatatattagcatttttaaacaaagacacctctttattttgattttgcatatggggaactaaaacaaaatgtttttgatgagggtttaggaagtcatcaatagggttaggaatcaaattacagcctaattctacgcgtatctgttgacataagcagaacgtcagtaaagtgcctcccaatatctctaaatagcctcttggcatctgaaacgtagggaaaaatattggttactttttaaccaaaaggcactaaaacttccaaaggtatatgaaatcagtaaattataaaacatgtccccttcccccccttctgtaagaaagaaatagaaaacaaaaagagagatgaatatggggaaaataaacaatgaaataatattatgaattaattgtaagacttgctaactggctgtgtaactttgggtgatttgcttaactattctgtgctttgttttcctcactgtaaagtggacaaactagtagtacttttgtggaagattaaatgaggaaaggcaagtcaagtattgagcacagtgcctggcatttactacttacgaaggttatgttctttattactccatctactctttccataattgcatcccctccaaccagtcctgtccagccttctccgaatccacaggacaattctggtctcccagtatggtgggcaaaggtaggttttggtgtccaagcacagctcagccatttactctccaggtccatgggcaagtaacttaacctctccaggttcctcagattcatcatctataaactggggaatattagtacatgctttataaggttattgtattaaaggaaataacttgtctaagtctcaatgcacaaagtcttccccagaagacagacttgaaaaaatattaactttatttcactctcctcctgctgccatttccaatgtgctgttgcatgtttctaaatggtatgtggaagaaagctgattagtttctttgctaattattaattgaattcctttagttaatacaatgtattcttttgagaagctcagctcaatttatagtgctagaaacatacaaatacagaatttatacgagttgatctggggttcacatagatgaaagggtgttttcctagcacattgctctgagaatactgtaacactcttacttcatgtatattcatgtatatacatatgtatatatctatatatgtctgcatctacatatgaatatatgtatatcaactgttcttatttagtatagttctccctgaaaaagaaggtactattttatttttaaatattggatcttatttttaatattggatctatctgtaataaagtagccaagttaggctgactacctgtctaatgagtttcccgtttagatggattagttccatttagtctgttccatagcccagatcagacagttcactaacaaatacacttaaattcacatcactttggtccagagggtgtaactaaggcccaaacctgcttctggtgaaagtgacccagaggtacgctttgctgataatatcaggagcatggtctttgtaattggaagacactgtctcccatctccccatttgttattgcaagaaaattagattctcattgaaataacaggcccaagaattatagtaacaggagtttgaacccctgtttgagaatgttggtactcctgggataaatgagatcaattttagcctataataacggtgctttctacactttttagatgttagagaaagtctggcagcaaagcaaagctttgtatataccatgggaggcagggttggagaataaaagaagaaagagagacttaagaacaaaattgtgtttgatgggatgttttgattttctttaaatactttaagtctctagaaataacaaatttattatctgaaatacaaataagaaatacttatatttggaaagttgataaaactcaattattgtgtaaaatgttcacaaatttccaatggatagaaaaaaataaacttttgcattgccaattattgaatacttattttcacctttggaaatagcaagtcagttacaaattttataaatctatataattgtctttatacataataaaaatattctgatgttttgtcagccaatatgcagttttaagcaccttcaaccctgttacatgtttacgggtttggaagttactggggaggaggtagaaaggtctgaccttctccccaggaatttaatatctggtcagagagaaagaaacagacttttgttgttgttttgttggtcttataaacagtgccaaaatgaatgtgtgtatgtgtgtgtatgtttgtgtgcacttgagcaatcatttttgtaggataaactcttacaaatgtaattgttctgaaatggtatgtatggtttacatttttaaaaatttgctaaattgtactccaaaatgtctctcctaatccatgtttctaacaactgtgtatgggtgtactgtttcccaccccctcacaatctgcatatttttagtcttttaaaaaaaatcttaaacgaatgtgataggcaaaatacctcattgtagtttgatttatttttggttatcagtgagattgaagatcttttcaaatggcttttgactatttatagttccccttctgtgatggttatttgcatccatgtcccatttttcttctgggttattggtcttactctaatttatagactctccttaaggcaaatgataccaaaaccataccatggctgtttacagtcgaccctcccagcttacgttgcattaataattgcttcttagaagcttatgttattcatccttctcctatttctacactgctgttttcttgcttccctaatttaacattctcaccattgcagtcagcaggttaaatggcaaacatctgaggaatcaagggaaacaactatgcattgagtacttgcatgtgctacatgatttaatctataccttctaatgtaatcctgaagaaatctaggagatatgtatcattgttttccagacgaaaaaattaagatttggttaaggttgggaaatgagactaagtaaataaagtggtaataagagactcaggtctgtccgatgatactaaaagcctgtgctccttccagaaaaccacgctttcttcagaaaaactgtttttacaagactgtattcaaacatatggcatgtcttgatatacatctaagtaaattttaaaattatatctatattcttaactgtccaataaaattgtgtatttatcatttacaacatgatgttttgaagtatatatacattgtagactgactaaatctagaaaattaacatgcattaactcacatggttatttttgtgatgaaaacacttaatatccactctgttaacatttttcaagaatacaacatattgttattgactagaatcaccatattgtacaatagatttcttgaacttatttttcttatctaactgaaattttgtttcctttgatcaatatcacacttgcacctccatttccagttgccccagcccctggtaattaccattctaatctctagttctatgagctcaactgttttaaatttcccatatgaatgagatcatgcaggatttatctggatatatacctagtagtgggattgctggatcatatggtagttctatttttaattattcaaagaacctccatactattttttataatggctgtactaatttacattcccatcaacagtgtacaagggttctcttttctccacattcttgccaacacttaatatcttttgactttctgataatagccattctaacaagtatgaagtgatagctcattgtagtattagtatgcatttttctgatgattagtgatgtggaatagtttttcatatgtctgttggccatttgtaagtcttttgaaaaatgtctttttagttcctttgcccatttttcaataaggttattttcttgccattgagttgtttgagtttcttatatttttggatacaaattccttattagaggtatagcttgtaaatattttctcctaatctgtaggctgtctcttcactcagttgattatttcctttgttgtgcagaagctttttagcttgatgcaatcttgtctattttggcttttgttgcctttggttttggagtcatgttcaaaaaatcattgcctaaatcagtgtcatatagcttttcccctattcttacatttatgtctttcatccactataggttgatttttatatatggtatgagataaaggtttatatttattcttctgcatgtggatatacagttttcccagcaccatttattgaagagattgtgtttccccaatgtatgttcttggcacctttgttgaaaataagttcactgtagatgtaggggtttatttctggctctctattatgtttcattggtctatatgtctgtttttatgtaagtacgatgctgttttggttactacaactttgttgtgtattttgaagtcaggtaatgtgatgcctttggcattgttctttttgctcaaggttgagttggatatttaatgtcttttgtggttccatatgaaatttagtattgtttttttctgtttctgtgaagaatggtattggaattttgatagggcttataatgaatctgtagattgttttgtagattgtttcagatatggacattttaatattaattcctccaatctatgaacacgaactatctttgcattcatttgtgtcatctttaatgttatacagctttgtaactattataaatgggattttaaaaatttctttttcagatagttcgctgctagtgtatatcaacactactgatttttgtatgttgattttgtatactgcaatttctattataatgaatagaagtggcaagagtggccatcttttcttgctctggatcttaaaggaaaagctttcaacttttccttgttaagtatggtgttaactatgtgtttgtcatatatggcctttgcttgttgaagtacattccttctatacttaatttgttgaggggtttttattatgaaaggatgttcaattttgtcaagtgctttttctgcgtctattgaaatgatgatatagttttcgtcctttgttctgttaatgtgatatattacatgtattgatttgtgtgtgttgagccatccttgcatccctaggatgaatcccacttgatcatggtgaacagtctttttattgtgtttttaaattcagttggctagtttgttgaggatttttgcatctatattcatcagaaactttggcctgtagttttctttttttgtagtgtccttctctggctttggtatcagggcaatgctagattcgtaaaatgagtttggaagtattccaccccatcaagtttttgaaagagtttgaggaaaattgatattagttattcttttagaaaaatttctattaacctagcagtacaagttagctagtttacacttggggctctgaggagatgtaatggagaaagagctgaaattggggttcagatttataaatctcaagttttggttgagcacgaaaggagagggagtgagactaatgataagaaggttaaagtaatcactggattgatttgggatgggcagtctcaaaagtgctgaggattcagttcctatttcagtgagctggaacacacaaacatagaggaaaaagaaagacagttcaagtataaatttgaatatacctaaatgtgtgtaaattacggaagaaacaacttcaaaagaaaataacaacaatgacatgggctacagaacagttaagattaatgatccctcattatagggtgccattcagacataggagttaaaaaaaaaaaaagcaaaccagaaccacacactgcagcagctccccagttgcaagcacactgaaataacagaggcctgccttcacgggaagaggattagttctactgtgacctgtttatataaaaacaatgttgtgggtagcaagattactagaaatgacttcttggattataaaggacaattatgatagcttaggccactagctttcagtacattccatctggtacgttacaaattagctcattattctgctgttcttacgaatgtgttagtctgcaaacatatcattgtcacaaattagtcacctagtgtttctctgaaagtgatttaatataagcacacccacatcataggatggaacagtaaaatgggtccttgctagatcctccaaacagaattcagcataaagcacaattcaatttccaaaggtttttggcacatacatcatcttctgattttctaagatgaaatgtgattgttgccctggatattggtaatacattgtaatattagaaacctcttgggtctccccatgaactctagagatccaagcctactgagaaatgatgggtccacaaattgagcatagcttttatttgtttttatttacatttgttatcgcaggtgctatcacaactgttgtttcaataatagcaatttcaatttgaaaattaacttaaagatcttattttgaagtgtgttttgtagcagatgagctcacccaccagctacttggaaagaagaagaaaagtgaggaaacataaacttcctctgctgtctaactggattacctactgagacatccccttgtgtgggttataataaatatttatggtaaacttcttaagttaagatgcctttggttgcaagtctggagcccccaacttaatggcttaacaaaaacaaatgaggaaaatgtactgtcttataacatgaattttcaaggtaggctattccagggtaggttattaagaggttcaaacacatcacccaggttctgctttgccatcttagcactttgtccttttgctcagacttactctcctcatttacacaggatggacagtcatagccagacaccaggaccaaaggcagaaaatgcaccctttcatgcctgagcaagaacttgtgaagatatatttttaagagagagagaactgagtagtgccgtgagtccaaccctaccctctcttaaagcgggctgcagttatctaactcacattaagctcaaagagagacctggccttcagccatttgatgtccttcccaagaggaccatctgggaaagccagtttggctccaagagcaagagttggtagggatggaaccactagaaaaccaaggccttgatgggggtgctggttaatcagcagcaattggaaaacaaggctcttgcttgagtcaaaggagttgcagccagaggacccagcagggataccaattatgaacccacaaaagtaccatgagacaaagaggcagctttcaacatctgccaggtctccaacatgtgatgccatcttacgatggcactaattcaggaaaacaaaacaaaactcttttcttcctttcctcaccactttctgtgccttccaatcccagaggagtcaataccaacggctagccagcctggatagccaaggaaggggaagagcaacccagtctcaatgccacccacttactccactgcacacagagactctgtggtgggcccagctgggagaggggagaaaatgtaagttcaatcaagtttagagttttgggttacaatttgaaatggacattctaatttctggatagagtctgagatgatggtttagcatgaatgcaaaggtctctattgcctaacagtacccagaaaagtcataagatgttctttataaataaagtttaaagggacagtttgaaagcaaataaaatgtgttttacactttgggagaccaaggtgggcggatcacctgaggtcaggagttcaagaccagcctagccaacatggtgaaactccatctctactaaaaataaaaaaaaaataaataaataaataaaaatagctgggtgtggtggtggtgcctgtaatcccagctctttgggaggctaaggtagcagaatcactcaaacctgggaggcagaggttgcagtgagccaagattgcgccattgcactccagcctgggcaacaagagctcaaaaaaaaaaaaagaaaaagcaaaaaacagcattttgctatctactacatgtcctcattttcagcaaatatgttacaatattgatatccatttacaaatatttttaactaccttgacaataccatatcatatttgtatctttcttgcgtgcttcccctttcttactctaatatttgaggggaaaattatttatgcctcctagcaaatatgcttctgatctttaaaacacctctgctccagcaaatggatcccaaaagagatgtgcattcaaggtgtggaaaacagcaggtcactggggggaatgggaaagttaggatttttattttttatattgctagagacagggtttcattttgtcacccactgcagccttgaactcctgggctcaaaggatcctcttgcctcagccttgcaaagcaccgggattacatgtgtgagccactgcactggctgaaaattagtattaatagtaatgtccttctgtcctagtccactgtttcactttcctttttcttcacggcttcctcctttagactcccttggactgggagtttagcactatcacctgcacactagacctgcagtctatgaagagaggctgtcagggatttggggctatcacagttgctcctcccagagcaaaaaatattcaaccctcccacacacacaggcagcagcctcatctcaaatggactgtgcctctaatcagtgagtggttatggaagacgaggagaaaagtgcatttatattttcattaactttgttcctgcttcctgtagcattttcattttgaaaatgagttgggaatttcaaacatcaataaaacgtgctgaggattctgacaacaaaatccttttttgtcatgtgctatgttgcccacttcctgctttttatttttgctccagtccctgtttgattgctaatctaaagggaaagggagggtcagtgagaaaagaggagaaatcttaaaaatgaatttactatttgatcaggtttgctactttattttgtggaaaattttaaagctcttttgtgtctttatgtattttacaaatcttggaactaaaaacaacagataaaatcacattatattccccattgaattatttcccacatttcaaatgtgcttcccagagagaaaagtataagatacagagctaggcaattcagtttcacattaatagttttgtgtctcatcagtttgggacgtgtattgttcatgttttgctttgttgtgcctattaagtgatttatatagtctattgcgatttttttaggaatggaatatgccaattatagagagaggtaggcgagttaaaagtttcaagtgctcagcattatagattcaccctcgagtcagaatgttaaaaacagcaaggaagagtgtgtaaaatgctaggtgaatgagagggcatctgtccacaatgggcaactagtatttaataactagccttgaatttattctacacttgaatgcaaagattattctacttaattatactacagtgactttgaaactattaattattctaaattattgggttctagtttaaatacatttttatatttttaagctttcaaatgattatttgaaaaaatttatctgaatatcctttttttcctaaaaaggaattctgccttttgagtactaaattattctctctataaatctaaaaatatcacagtatttcttttttttccaaaatctctctctctctctctttctctctctctcacctctccttatctgaaacaaactgacatttaatgaagaaaactgtgaaaaggggttcgagaaaatgagaagctagtattttgattggaagtgtaatagatgtcagtcagagaaaaagaacagtctccagaacatctagatgtggatgtagatgtagatacattgttaacgccactctgtgcattttaatttaagccacttgatcatgtaaccattaattcaatgtcaagttcattcattgtagctattcaatattacaatatagcattaattttaaatgactttatttcaggagggaaggaaataatttatgaatagcaacataaggtttcttatatgatgactcatcacaatgttgattgcaaaaaaagaagctgactcagactagctcctgtagaaaagggggaacatagttactatgaagatacagaaattaacagaaacaagtatagcagggcctattggattaggaaaactgaaattaaggcagctactctctttggggccatacaatcaccgatttctttttgtctctgtgtttctgttctttcctgccttctccctgtaattgccactgtctctttagttatcagtttgcactgaacccaaaatggtaacttcagcccctgagtctacaggacattttggttcaaccccaccttgaactgattagagtctcaatttcacttaggacatttcacattccaaagagcaaatattaatatttgctgcctagtaaatgaatcagatgtcagtgagtcaagttatcatgcttattcccatcagattttataatggtgaagtgtaggaaaggcaaggtctttagaaggaaacataggcagacataagtaatcatgtttggtatagagactcatttattaaatatttatgataataaaatacttaacaaagtcaatgtcaagataataaggactctgagtccttattatgcaccagatactattctaggcattagaggatataccaaggacaaaacagaccagaaaaccccactacccctagagcatgtaccccactacatgctgatgataatctttagtcatctatttcaaaaataacttaaaaatggagtggcaatgtctctgcgtagtcaattcaagatgccgaaataaaaatacatgtatatgtgtcttccttgtgtgtttctttttttttttgtatttctcgtgttgaacttgcatggttttctaaatgaaatattttcatttttaatgtttcatatatgtgtctgtatatatatatgtaatatacatatgttataaatatatacaaatatatgtatttgtaaataacatagtcatatttgcttttatacctaactctgttaactgccaatgatgtgtaattatatatgtgcatgggttagaagtggtggatggggcctttggattttaaatggcattttacctgcagcctctgatgcagcctcttccagcttcctattaaagtgactgaaaacactgcaaaaatatatatatatataatttttaaaaagcactaaaaaccagtactggcagaatattaaagaagcgttaaattagattgacaatatatatggtggaccacacattgtattccattctaaaagtaggaagaataatttcttagttttacctggaccatacaatacatctactatgtcctactactgtagtagtatatgcagcgatatactacttaagatttttaaaaagaaatatacaagcagacctaaaggtggatcaaaactaaagagttaagaatagaaacatccagaggaataccctcttgagatcatctactggtaaaaattcatcacaagagttttaaagagaataataacttttgtaagccccatctgattgaactgccttccccagtaaacctgtgagagtggagaggtttgagtattttcatggtaatttctttaccatgtgccatctggcaaataaaagagttcttttccaggcagtactttttaccaaattcagaggtcggtgaaatattcttacaacaacataaaaatcggtggtaaacccactattcctggaggggaggaagactggaaagaagtatactgacttgtcttttgggaatggaattatggatgacttgcttctttcttgtgtgtttattttattttatttttgtatttcccatgttgaacttgcatggtttcctaaatgaaataatgtttcctctttaaaaagaaactttaaatgatattgaatctagttaaaatgaaactatgtgataagtttcagattttataaatagattgtcaaaatatgtgttaaacattcttgataaaattacatctttgcttcaagcatattgtaaagaaaatggaatctattgacattacaaatagcaattttagcatccataaatttgaaattgtataaaaattgtacatattctgggtataaaatgttaatgcttgtcatgtaactttgtaaaaactttattttttaaagcatttttaggttcacagcaaaattcacagaaaggtccagagatattccatttactccaacccccacacatgcatagccaccccattatcaatatcccccccacaaaagtggtacatttttttttacaattgaacctacattgatacatcattatctctaaaacatatagcttacattagaatttactcttagtattgtatattctatgggtttgcacaaatttatattgatgtatatcttccatttttgtatcatacggataattccaacatctctggcatgtctagttctgatgcctcttctgtctctttaaactgtgttctttgcctttaactatgcattgtaattttttcttcatagctgggcatgtactggataaaaggaactcctgtaaataggccttaagttatatgggtgggccaggcatggtggctcatgcctggtaatcccagcactttgggaggtggaagcaggtggatcacctgaggtcaggaggttgagaccagcatggccaatgtggtaaaacctcatctctactgaaaacacgaaaattagccagtcatggtgacacatacctctaatcctagctactggggaggctgaggcaggagaattgcttgaacccgggaggcggaagttgcagtgagccaagattgtgccactgcattccagcctgagctacaagaacgaaactctgccaaataaataaataaataaataaataaataaataaataaataaataaaataaaaaagttatgtgggtggtggtgtggtaaggggcagtggaggggaagctttctatcattccataattaggtttcagacttttggtgagcctgggcctctggattgtgaatctcctaagtgtttttcaggttttttttttcttataccataggtgagagagaatggctaacgtgggctggaattgagtatttcctttctccttgatggtaggctagagtgggctggagttgggcatttttctttccccaggtcagtgaggctctaatataacaaaacaaaatggaacaaaaaaccccagcaggttaggctctgattaactagtttctcctcaggaagaaccaagcttcagcagatttaaagatgtgtactttttcccttctcttgctggaagcatgagagaatttttctccaatatttactgtgagaacttggtagcactcctggaggtaaaacacacagaattgtggggacctccctattactgggttcctctggagtttttcaactttcagacttgcctgcactcagcctctaacgatttgtcaattatagttgaggtttttctaccccagcactggttctcttggaggtttctgctccggtatgttgtgattctccatagcctactgtctatctcaccagtggtttgggcagcagtttgccctgtgacctcacttctcttatggatctaagaagagttgatttttcagtttgttcagcttttttgttgttaggacagattggcaacttccaagctccttatgtgaggaactgaaagctggattatgttacttttttactgggaggttgagtgatagaagaactgtcatcagaagtttaattaaattatcaatcagtaacaatcaattaaatttccagtgaaagcaaatctattttggatacatctaatcaggataaatgaaagaataagtgtgcattcttacaacatttctcttttttttttttttttgagagccattacaggtgcgaaccaccatgcccagctgataatatgagtaagttttgaagttgggctttattttattacatgagaaatatttttgctcctttgaattttctaaacaaatattatacaaagcctttagaaaagcttaagatataaatgaaatgtaattccatttcagaaggtagttttgacattacattatttgtattttttcttttttttccattttgattccagtaaattgcaaaacaaatgatctgtattttattatattttactaagcaaattttaaaggtatatgcaaacaacatttaaagagctcttcttattaaaaaattttaaattataataagttaaaattataataatctaagtgtttgtattacttccatgctacggataaggaaattgtgtctcacagaggtttcatgcgttggtcaaaattacacaaaaagtaaaaggcagaacctgaaaataagggttcacatcttaggactccaagatggtatacacatttgacttttttgtctttaaacttgctgtgaacatttttccacttttgattcttaagtataaatattaagtgccttctttgtatttcagtattaggcttttaagtcttctacttccaaaaaaaaaattaaaagtaaaatttaacaagcattctaaatattccaattatgaaatatatttcatattatgagatttttcttctgtaaaagaatttatcatttaagattagaagatttaaccttgaggagtatgatccaaaatggctttttatattagttgaatcatgaaaagtcccaacaaagcatttgctggttttaggtgatgaaactaggtgtttaatgaatttattttttcttttctaattggtgattgtaccctgggttatgagaatatgtagaaattgaatgtagtagctactagcaacttgctgaaacatgatgcatttccctgactctcagcaactgaaactgcggcttcatgaaaggcttctcgtatttcagttataaatgttcagaacagcatgccttcagactttgctagaacttgccaggagtggaaagtcatgactatcaacatcgttattagttaacattgactgagtaccaacaatgtttttggtgttataaatatagagaagaagacactgttctgttcctgggggattggctttctgtaaaggtgagatagagaatttggtcttgaatgttcttttcttgctgggaggtggggttggaagcacagccacctcaggtctcattctgatggcacactcacctctttattagttgatgatatatgcaataaaaagaaaaaaatgtataattacacatacatacacacatgtgaaaactcatgtaaattttattttttattggtaaaaaatatatatttatggggggagcttgaggcaaaaagtcacatcctgcaagatatccaggtgacagtagcttctatatccttgtgtataatgtatttatactgttattaatagtatatagaatgtgctaagaaaagtacatagaagtttttgtatgtgtaaatatatttatatgaacccaatatgtagaatacagggaccaagtgttttgtttttgacatctaagggacaaaagtaatccagcctcttgaaagaatggagactttccaaaaatatctgaactgattattggtattcatataagataaataagtcatcttttaggtctttattctttgatgtctaaatatacaggagttttatttcatcaagttatttaagaggcaaacattgacattagctattgattataccaaaatgcaatgatgacaaaaaaatataccttaacatttgacattaaagttactttctgaaagtgaaactcagggaaaatcaatgaagtaactcatcacaccctctgataagtacaagtgactaaagagtctaggaaatacccaacctcaggaactagggtgtgactttattatactatgcttatactagcataaaggttgaacttaatcattcttttatgctcattgtgaaggaagtgtgtaagttgaaggcattttaagaggatgaaatactgaaactgatattacagagataagaatttgtgtagaaagtattaattctgtatttctactgttacatttttgtaattttttttaaagagccagactttttttgtatgtattatcaaactttgagataaaactagttaaagcagaagagctcttgttgaaacagcacaaagtacctggcttcctagacccagcacaaagtaccttgcccctcagctgacctgatgcaactttgaaaaaccatagggttcccagaaacttagtttgaaaaccttcactcttatgagcataaccctataaccatgagagaaaagggttttattggaaaaggacgtgggacaccggctagttaatacttctggctctgattctggatgcattaagcgatctttcaatgaaaatgttgaaagtattttggtttgctctgagtttgtagtttatcaattaattgagctttttattgaatcagcctcatttaagggtagttaatataagttcacttactcttgtgcttgctgtgggattaaaatttaaaaaaaaacacaaaacaaaacaacaaaccagtctttgctctagtagagctgaggttatgccatagctgcagggacttcactgaggttatgccaatttgtggtgccctgctaataattcgcactcctgtattgataaaaataatggggctgagattagccataaagataatcttttatggttactcctgatatttctttttaatttttttagagacagagtctatgtttcccagcctggtcttgaaatgggctcaagttatcctcctgcatcagccttccaagtagctaggactacaggcatgagcaaccagaactggcttcctgatatttcttaaaagtttcatgaaaggatgattatcttttagtgtaacaaaatagattagcattaccctaacccaacaacattttttcatttttgacaacttgtttttagattacaaacctattagttctgcctaactgttgtttcttgaaggccatacatgtaggaagtattaaatttgtaaagtatcagcctataaattagtagacataactcttaagaccctctttctaatataaatggaataaaatgctggaaatgagttatttctattttctaagcaagcctattcttttatatttgttgccttatgtctgcaaaaatattcaattttggattgtttaataatgtgtagtcttgattctctgaactgtgaaataaattacagttttttctttgctatctttcaagcagaaatttggcttttctgttatttatcatagtttctcagttgtgtttccttttgttctaatttgttagactttattctagacagttgcatgtataaaaataaaaatccaacgaaaattcactttaaaaatattcagctaaaatgtcctcttagtttaagtatatttagtagtttaatggccaaatcatttgtattttatttataaagtgctttgcttatatcattgcccgcaaatggaaatgtagctaacaagtattgaatgttgaactgtgtggtagtggagaaagattcagaggtattcttactatcctatcacccataggtgatggtttgacatatgaacagagtagaataaaatggactaagaaaataatgtcagataaatgatgttcattacaaaggaaaatatatttttacatctttttaaaaaatctttgcatttgctactttctatggagacctactctcttgtataaggactgaatgttagttttaaaataattaaaacccatcattatcatcatcatgatcaaagatcactaaccagagtcaaataatttgaattctcttccagatctactgctcacaagatgcctgataatgaacaaatacaatctttttggcatctccaaaatgggcataataaatgtcttaatctcctcagcataattctgtgatgccaaaataatacatataacaataatattttagaaagtataaaagtataacaaggtggtattattatgattacagaggtgctagaatattgtggtaatgtgtacaggctctggagccagacttccttgattcagatagtgactcactagatatttaacctcagacatgctacttaacatctgagtgcctcaatagcctcatctggagaacagggctagtaacagtccttaactcatagtgctgttgtgtggattaaatggggtaatactgtaactatcttagaatgggacctggggcattgtagatgttcctagctcttaaataataatatttaaatgtctaatataatatcaaaattttaattacttgattcaaaacattcaaagcttgttaaaaacaatgtaggctgaagttttctgggccagattacaaatgaccttatggaagagatttagtccctttagcaaaaaggggtcatgaggacactgcctaggctacaggaaatctcaacaaatattctcaagattcttttatgctgtagtggcatctttctgaacctacaagttcacattggcttttaaggaatcacccagttcttcttcctcctaggaatcctccttttaggatcatcttttgatcaaaatgaaaattctccaaattatggtggtttttaagattagttttctttatactaggttttgaatttatgggacatgccctccacccaatcttgggtaatattttctgcaatgacaggacctcactggggaaatcctaaatgaagataatagcatgttatattaaatgttgccggtattccatttaatatcaagcaattgcgtaaaagcctttttaaatacctaagttaaaagtggtatattaatgttgagtgtacttctactgcaaagtccattctcccactgatttcaaacaaataccatttaagtgccaacctactattacaagagtttactattttattcttgctccaaaatggcatcaacagtgatggggtgcttttgggggattattgaacagaatttttgcaacaaaggagcaagcatgaagaaatgcaaaacatcagtgatagggattgcaacgttttatctcagcattcctcatatctacacaccccctaatcaaacaagcagttttatggcatgcgcaattgcaattgaagtacaactgacttctgcagaaccggcttccataggatttcctgtccaaaaatcaccatgtggtcatctgcagctaaatggttacaaatcatcaagtaaacaaggcttccccaccccggtgctttttttttaaggagtgaaatccaccaaactctatcatttgcaaattatctctggacttcttttatttctttttttttcactgggtaagaaggaaaacgagcaaacaaaaaatcctccctccgtatttgtttaaggcgtaatttccctgtgaggtgttttacaggcttctccttgtttagcttttcttgcctggtaattactgaaagaagtctgctcttccagggcgagctattcctttaaccccttttgcttgctcttacttggaggttagcaaggagtgcgcggctctgcaatgtctgggaacccacctagagggcccccttgacgccagcacatcccctgtcaggcagcagtctctgcagctgagccaggctgctgcagagttaatgtacagtaccacggagcctgcaagtgtcctgagctgatcagagctggggcggcacagcccagggcagacaaggcggctgcgaggattccaaaggttctgctggaaattcggcgctgggggactccagcaggagcctgttgccattgtgttttaaaagcatgcaaggtctgtatagcttgggcatgagaatctttcagaagatgtcagagcatcagaataaatgacacctattggaaaactgaatttggggtgaaaaacaaaagagattgagagaggaaaaaaaagaaaagaaagacatcgggggaagaattcttagacaacgtctgacttgcagctgtgaaattcattttctttccaaggcaaaatatgaaaagctcccacatggttttgataataacaaaataaaggggattctgcagtgaaaagatcaatagcttagtcattttacttaaagagaacagccagccttattatggggttaggcagcagaaatgaatttcatcgtgacagcatcttctgaagtcatgatggtagttaatggtaatcttgtcctgcagagcagaaattactcattgccttcctacttttgcagttgaaccagcaattctgaaatctgggaaagaagttggctttggtgatacatggtttctagcccctctgcccaggcctttgtccgacacgtctcagacggtagcactgcgttaaagtgaccatacatgaatatgtgcctaagaaagaagaaaaagcaatattcatttctaaaggacagcatggcaaagcaacctgaagttttccatttcccttctaacacttctttaacaaggatatcaagaaactgtcttttgactcctttcttcccacattccagagtccttccttaaggatgcattaatttacactcaaggcggttagattttaccaggacaatatttgccaccatttaggattattagttgaactggttattttagtatgttgactaactagtggaacctaaatggatggacccatacctgcagtgctctgtgatgtttcttttttcaaatcctggaaggccttttgtaattgctatttgtttttattggtggggggagattttttttttttttttttgggattcaatacttgttgcaataattgcccacgatagctgctcaaacaagagagttggaattcatctgtaaaaatcactacatgtaacgtaggagacaagaaaaatattaatgacagaagatctgcgaacatgatgcacgtgaataattttccctttagaaggcattcctggatatggtgagtaatcaatattcccttcagtttgtaaaactcagaattatcaaattccgtgacaggtaccagatgaggatttgtcttgaactagagtattggtatcaagtgagaatgaaaagtaaactgtgcaaaaccgaatattgtctgagaaagtaatggttatgcaataaaaatactttgttaatatgaagcatccccaaataagtcaagcatgaggacttgagaacatttaaattgctaatatttcatggaggaagaaaaaaactttgagaatggcaacaatttaataaatttttttaaagatgaggcttagggtttgttttttgttgttttgctatttttatttgaaaattccctggggaagggcacacatgaatttctgatatatcaatttgtctgaatttctaaaagaaggttaagggaaacttagaatgttgactcaattttaaaataatgctaaaatgtgttggtgcctcacagttaaggatattttagctattcaagaaatatttctaccagaatgaaccagtagaattctagtagaattctaacatatgaatcaggaagtgctcaggctctcatagaacttgcttagtgccttgatatttggtcatctattaaggttcaatgcaatgcattcaggtccctggacatgtgatatcatgtgccatttcttgctggagtttatgactaaatgtgtgtaggaactcattgctgagggtatttataagagcaaaaggtcattattttaaaattgcttgtttttgccatacctttagggtcagctggattctgactttcatagcagaaactttgtgaatgcataataaaggcacatgttaaggcttagtgtctgctaacatgggttgttttggaaatgcagtttgtctgattttgaaagtatatctttcaggtaaatgttctggctggactctggatgaataatagatacctaaatataggtttcggagggctttccagctgcttttatgacaatgtctcaaatgaaagctccctgagagcttaaggtaccaccaaaatcacctgctggtttgttacagagttttcggctttcagctaaaaaatccattgcagagaaggatgggaggcatcctctcccactctaggcaggtgcttattttctaacaacaccagatccatccagagtcgatgctgtggcgtatctaccttttttgctgaccagagctactatccccagtctctagaatgcttgggtgacatgcctgcaaacctcggtggcccacttccaactgcatcaccagagtttcctagtcagggggagccttggtgccattgccttgcttgttctgttggtgagggtcaggcatcagcaataaggtcctcattattcttacagacaaatttacatcaatagtctttaatcttgagattaaaagatcctggaaacagttcctggcacgtagtaggcatttgtcaattatttttcttctatgccttaggcttttcttcagagttcattttatacctcttaagatttgcttgggaggggaaattaccagtctcctttctatcaagtgtaccttgctacaaagcaacagtttttgttctacctaagttctgctgtttaagcccatttgtttatgttgtaatacataggatccatgtactctttgaatgcctgcaattataagcactttttatttttattgcattagcctcacctatacttttgactggaaagaaataagctattcaactctgaagttttggaaagaatgcaaatttgcttattcatgctcctctagatctgtaatacatatgtttgaaagctgtatggagaagttgagagtcctgttggttttcttttgtgcctggagttaggtaacccttcatctgcttcactgcatgtcgtaccaatctgttgttgttgttgtggccaaactaagccaatgtagaatgttaatgctctgtataactcctactcttcctgggccccttgcagggattcattaatatgatgttggactcaaaggaagaaggtggtggtttttttccaggtgacctaattaattttgtgcttggttcttgactttctcaatggttgttgttttcctcttatttatagcctccccttccagtactgcagtaagagattgtaggggtttgttgacagaaaaccctctttccctttgtcctactgtaagagcccctatagggtgagatttcaggctcgtgaattatcgtgcttagaataaaggtctcgccaaattgctcttttcatctccaaagactccccctatcctcattctcacatttagagccttttcttcgtgaagggaccgatcagaagttggcaacaggccagtgctaaggaataataaacattgtaaaagacatatgtgctttggtttcacgagccctagctcatctctagaaaggctctgtaccctttggagaggcgggacttggcatgtgctggtcctctttctgtcctgctttttgagaagcaagaatgagaaaaagctgagacacaggaggtctagggtagtcttcaaattttaccagaagtagtaattgaaatagaagcctgtgcacagagttcctacttgtactctcatccacctgccctagggctggtgtgttgattattgagcaatagtattacaaattcactctttatcagttatgagttaaagttaataagtggtcctattacttggtttaatagaacactaccccttccgtgctaaaagagtggtatgaagaatgtgtgtttcttctttgaagctacattagaaatattagctggaggattttattgcgaaggcttctttccattacacttttcagtctttttactgccaagccaaacaaagataagggtttgcctcactggatagataagtactatatagctcttcttatttttccttctggctagttgttagaatggagagatagcctggcattcaggaacaagtatggcatggttgaaagaagggaaatgcaagtcagctttctaggaatttaaatttcatgtagcagcagttaagaggacctttagaagcattatgacctggaatcacatgccagggtctaacatgaatgacctaacacagtgtgactaacatgttcagctttttgcctgacttaaaagatatataacaactttttataatcttatttgtaaaaatactataatttcatgccagaaacatcaaggctatgttgaatgcaattgaatttcatagctaaacaatttaggagggcattttatttaaatacctttgcatccttttaatgatggattcacatggctaaaaggacagtggaagatagaagctaaaggccctggctaggagaggctgtggaatgctgccatggagggcccctctgaggacaccagaggaagatttgggattaatgattgtggaaggtgattaatgatttgcttatttggtgcttagggtttaatttttaaaggtaggacatctaaatgttttaaactgtctttgtgatgctgagaggtaactccagtgaagaggcaaaatgaggtgactgtggcactttcactcaacatggaggcatctttttccttcttctaggaccctaaattctttcattagactgtccttttccaggtatcaatttctaaaaggtttagtctagaaagttatttgtttgattgttcctctatagaccaagcattcaattcataaactaactcatactgttttattctgttttgatctaaatcctttatggaatgaagcaagatataaatcagtatattgataatatattcatatatgtgttcataatttgcatgtatatgtgtttaaatctactaatataatgaatacgtattcagagaaagtcagaatggcctgccttctaatgaaaagataatccttcctatctagcctcatagagtttcatcttttaaggttttctcctcttcatacattgaaattacagaaactcaatccagaagtgcattttccagagtatgtgttctgaccaatacattatattttattagaattttagggggtgggagcaatattgagtttgatgactatgtatacgttgaaggaaatgacgtatcaagtctcatgtaagataatggagctttgctccttttagttaacttaaaattattgcagtgtctgcttgtcttccagtgaaattgcaggtaatagctgaccttgcttctttaacatctcttcctctgggttacagaacaacccagaaattctaaaatataaataccagactgccagcttaattctgaattcctgttggggccaaatacaatttacttgtaaacacttaggaccaataaagtttagatggagctcataattatacaaactcatctcgttcacaaatccctagggctcaatgttaaagtcagccattgtttaaggcagaaattcaggtttagatatagtgtagcaaagattttccattatatgagatatcgatcctattaaacataaaacttttctcttggctttctattttactgtcttttgttgccatcagctgtatgccccttaattttttctagtaataccttggaatttaaaaatgaaattacaaatgtttatgttttagtgtttttaaaaataattcgattaagtatgctatgatagaggagcaaagttgttattagtaatatcaatgtgcttacaacttatggaaatgaaaaatagtctttagtcctagcagcctttctgctgtagtaaaatagtttgtgcactttaaatcgctgtgaggttacatcttcaaaggactgagtggcataagccagggaggtcttagaaatcttacaaaaggaaaaaaataagaaattattcctcatcatatgaaaattatttactaacaatgtatgatgttttagcttcttttaaattcttcactttccactcctttttgcttcttccttttagttgactattactgagttacttacactaatgttgaggtatttgggttcagagaaaaataggcaagtaaaggaaaattgaaaatagtttcaaattctgagatgcaaagaagaacccaaaaaaactaaacaaccagttttttattgccataggtcgaatgttcctttttaaaaaaatccctcatccttttctctcctctttcaatcatatcccacaaacgttaatgctcattaatactctgtctagctatagcattatccacatttttgcaatagctcaaaaatgtctccaagccataactgctgcaactgcttataacttgatggactattaggtgacgtttccagttgtttgagaagtaccagcctataaacatacccaagacaatatattacaactagggattatgttgtgtaaaatttatacatatatatctctccatatatgatttcaaggatagataatctagagtctacataatcaggctattggctggaaacataaataaactaaaaaaaaataatttaaaaaaagcactccaggtttctaattcagcttctggagtgttaatgttttgtgtgaccttctgaaagctctttgagtttttaccacttttgaaaactattacagcagatatttacccacttcatgttaagaagtaggctattaaagaaaatctcatagcacattggtaataacaatttattagagaccagcctgaacaacatagtgagaccctgtctctctctctatttttttaaaggtagctgggcatggtggttcatgcctgtggtcccagttactcagggaggctaaggtgggagtgtctcttgaattcagaaggttgaggctacgataagccatgatcatgccactgcactccagcctgggcaagacagaaagaccctgtctcaaaaaaataaaagaagaatttattagaatgttgacaatgacatgccaaaatctcttgtataactatcatatacttcatggaagagatcaacactgttgagcactcctctgcatgccatatgttttcacataagttacatcctttaatggcaatataactttctgagaatttcttatccaaatccctgtttgcagatgaggaaggtaatgttcacagagattagataacttgctgaaagttcatatatctattgctagggaagctgacccactcaaaaccaggcctggcctgattttagagcccaatatatttttaatccaccatattgttcttgtggcagatgacttagcactcttgtttatggatctttttgaaaattagattagcagtagaccagagaaaataagcagatttaccctgttatttagcagcctggctaagtatgtaggatgcttactgaatgtgaatagcctttccttgagaaactcttccttttaatgttagaacaatgacctatacttagactgtgtcagcagctctttctgtattttctcagaatgagaaatttaaaaggaatttgtggtgaactctgtttccaaggtcactgtggcctataggatcctttcactaaaaagtgcctctctggacgatatattaggaaaggtgtcacactttgaacagatgaagtagaaatgcaaactacagtacttggtgaatggacagagcctctgttcaaagcaaaagtcactcttcccactgggtacacacttggtgtgtggagcatagatgaattcagctctattcaccatctctgcggggcattgttgagccctgttcaaactgcctatctctggccctgctttgatacgggctccagctttactttgtgacagatgaaatggttttgagaatgctttgccaaaaataaaagatcatccacattttaggttttgctgccataattattactttcttcaaaatattcaactaattgtatgtctttaaacttcattttgtgctcaagtaaagaatattagtattatctgaaatcagatccaattgccaaagaagcattttaatcataaaatagcccaatttctgagttactgaaaaatgtcatggttagtgaattatattggaacaggtggaacacactgagttatttattcataggggatgcccagatgaatgtaataagagtcctgccttggagatactcataaactagtctggagaacagccacagaaacaaataattacagtatagtatggagcatattaatatagatatatacaagttgttacaggagtcagaaggagaaacaacttaactgacttgatccaaataccttaagtttcaaagtgaaaatatatttgatggatttgggaattagtagttactgataatacttcagagagtggtttaagggagtgtctgggggtaagttatatttcaggggtaataaaagcagagaaaagttgtgcaaactacttctttcaaaattttgcttaagaacgaaggaggaggagaagaagaggaggaaagaggagaaggagaggagaaaaacacagtagctagtgaagaacaccaagcacttttaagagtaggaagcatgtccctaaggaaatattctgatacagagctgggaaacttgtggacatgacaccctctgggatagggggaggaaaaggagggagaatgcagataatgtggagattaggtaggtggaaggagagcctgagggagtttttgttttatgccctgtgttttctctgggaagtattaaatggaattcaagatcacatctcagaaagaggaccagggaggagcaggtggaggagcttagtaagatgatggaacagctactagggggaattggaaaggttattgaagagagagtacaagacagtcaaacaagttggaaaaaggtcagtgatgttgaatgaatatatccagtcaataaaagacgttttactctacttgagaaattatttacacaaagtattatgtcagggaaatgagtagagatgtgacagaaatgttacaattcttaattattaaatttgaaactgttttgtgatgagaatgtctcctatggattgtgtttcttgggattccaaagaatacagagttgatcttaattgttgttgttgttttatttggtagtggtggaaactgttttatgaacatattaattagattgcagttccattttcatgacctgattttttgaaaatgtgagatttcctgtgctgccttgaaataactcttgggtgacaaacagaagctttaagatgtttgctttgaattttatcttcaaatgaataaaaatcacagtgggaagaaaagccaaaatgattcagctttgctccctttttaataggaacctttctgtggtttatgttagaatgtcacaaatccatatatatgtaacctgcttttacaaaaatttcttcaaaaccgctatgaagcttacttgaaagtgtcaccagtctctgagaaatgtactggaaataaggaaacataatatgactttaaccagaactgatgtaacccagtttaaatatttatacatttaaattctcttttatgtctccaagataaataggagaaaatgacaaataaaatatgtaagttaagggatattattaaatagccttataattttctaggtcatgagaataaaccctggaggatactgtgactttagccaatattatgaattcctttcatctcttctaatcatctcagcagagcttccgctattattgtcagcattcagtgctcaccactactttatacagagcttgctttgtagaatttttgctgtggctctaaaactctaaataagattctaaaagtcttagtcacttgtcagggaacttcattcttcctctcccttgagtctccatatttttcttttctaaatatgaaaatgagaaggttgacttaactgatcactaaggtgctataaaaatctatgatcttatatcttacctagttaatttactcatttctgtcttattcaggcataattgttcttccattaaaggtaatgcagagaaaccacacataaatcaacaaacacctccaggactgagctctgatgcttttctcaagtatttggcctctcctatggaatatccttagcctgtctaccttgggtattttgcttaattccttctccacaaaacctaactttaaatggcagcctttttcatggggaagacagcagcgttatgcccgttaatgctgatatccacagtatttgagaaaacatattccatatgcaacctatacatttctcatatcttcccaactcttctcttgataaaggtctcaggcccttcctttttcatatatcctccatttaatttaaggaaataacatgatatgaagtcctcaatcttaagaaccttgtcattgggttgctcactatgtttaaaacaaataattggcgtaatgatggagagtcccttgatgttctagagaagaaaggaaagctagcaatgtgacagtgggcaaattgagaaaaccgtagtggtattgagatcagtgaaagagacctcttacaagtcctaaagtaaggcatttgagtcttaaacctttgggtgtgttaattttaaaagaagaaaatatttgtgggaaaagtcctattttttagaaaataatctgtgccagatttgatttttgagagaggttgaatgctaagttgcctcaggatgtcatcatttgaaagggtgaccacattctgtgagatcttcactgcacacaaccttttgcttcaaagaactttctgagaccaagctagcctttgagaccaggtattaacattataatctgttctattcattgcagtagccacctcgactacttttttctactttataccacaatacccagcatggtgttgtacttaataggtactttttaaattttttcttaataaataattatgtgtacagaaaagaatgataaataaaaattatattgtcaggggaaattttaattaaataactttatatttttcaaataatgttattgtgctatgttttgagataaggtagggtcgtatgctataaaaaataatacagataataactatcacatttaacaggttatccattccaagtatagactaatttttttatagacatcattttacttaatcatcccccaagtctgtggcaagggcttgttatctacttactaagggtgcaaccttgggtcacttatctaacctctccatgatctgtaacatagggacagtaaatagttctcattgcatagggttgctgtgaagattaaatgagaaaaccagtctagtgcttagaacacctgtcactcagtaagtatccaataaatattgttatagtacagattaggcaactagctgtgaatggttaaccaggttgcctagggtaatcagtggcaggccacttccaacctagatcttacccattaactataggttgcttggaggtctaaactgcctcttctatatcacattcttgttcagtaaatacagggacaataccttgggttaagtttgaattatgagggataatttatacctcctcatctctcaagcctcagcaagaatcgactgatgtgccctcccatgttgagtcagtgcctaccttatacaggatggattttctgtttatgactgtcttactcaggccctgcttcattagattctctgttcttagcacagtgcctgacacatagtaggtgctcaataaaatgattttagagtaaacattacttttccagaattgtgtcctgggaatttacggcttttaatattaatttcaggtttttaggatatagcccatgtttttggggggatagatactgtttctataaaaattgtcatcttgagcataaataattcccacatatcttgatttctgtcacttgggagagtttaactggatttgtagaagcaaccatcctgccgaactgggtgtatctgtaaaatctaaatgctattgctacaaatcaccttatctaagacaccatttcttcaaaactaataactagctcattcactttcatataggaatctttctttccttgaagatatgtatgttttatcttgctggtgagataaaagtctgtaaattatctccacagctggctctgatgcttgattatgcccctttctgcatctataacattgatgtttcattttaattacttttcatcacagtacatgatgtggtcttcagacatagaccagcctctacgtgtggctcttcgttctttttatacatctttcactgtcaaactaagctctaaaaatcatctccctaatatctcttcacttgccaagaaaatgtactagctttgtattatatgtaatacagcataaagctctgcctcatctggcctcctcctttctagtctcattgtagaaatgataatttttattaatattatcagtgttaattaatttctctcattattctagcatacatatcctatatttgagtttttaaatatatcaattctttagtatagtggttataatcacactatatatgtatagaatgaggttttattctcactttattatgaaagagtatcaataactattttatatcattatatgtagttttgtcagagaacatcctgaaaaattaacttcaatgttttaaaaagccatagttctcagtgtgatggagatggtgaggattggagaatgtcattagggaaggcagttgtatcatttatcagaaataactgcaagactttgttggggggaaagtaataaggagtatgaaaatctggaggttgaagagtgggtaggaagaggaagtgacaggtatattttgataaagcattcgagggtttcatacctctctctcttaaccagtagtacaatgcaagggaaagatcccatgctttaaagctgtattgaaccaagttcaaattcaactctgatgctgactggttaactttgagcaaatcaccttttatgagcatcacttaactcatttataagagaaaaatagaacagttccaatcacccagatttactgtaaggattcaatgagataatacattatttaatttgtcatttttaaaccgcagcttttcccaggcagcatttaagacaaccaacaaagttatatgtgcataacttatagggagaatgttgatgaagggcaaagagaaataaggtatgatgttcctactcacatatgtatgtaatagttaaaaaatatatatatatatattacctttacaaacggcaccagaatcctcttggggaaggaagaaaaatgtctttgctagaagatatttatatatatatatatataaatatatatatataaatatatatataaatatatatatttttatatataaatatatataaatatatatttttatatatatatatatatatatatttttttttgagacagagtctccctttgttgtccaggctggagtgcagtggtgtgatgtcatcccactgcaacctctgcctcccagtttcaagcggttctcctagctcagcctcccgagttgctgggactacgcatgcaagctgccacacccagctaatttttgtatttttagtaaagatggggtttcaccatgttggcctggctggtctcgaactcctgaccccaggtgatccacccatctcagcctcccaaagtgctaggattacaggagtgagtcactgcagctggcctagaagagctattttgaacgtgcccttgggataggaagaaagtccctgaggatctgactataggtaggtgctcaagtgctctaagggtgaaaacttctctgcataacagaagaagaatttagtgctaaagagccaatgagaatgatggagatgaggcagagaaattaggagagaggacaggatgaggaaaattcgccctgggaaggctgagaactgcgggtatactccataaacagatccctccccagtactgacagtggttcggtgggtgaggggtattggggagggtacagggagttgctaggggtgggaagaccactaatatatgtatgtcttacttgaagcctcaggagtacctgaagtaagtgattttgatggtgttggtggcatgtgaatcaaaatgagctgtgttgtgttggcaaagcaggtcaatgagcccagcctttaggaaattatcagaaatttagaggtgagttttgggattcttactggtcatgaaattaggaagttcaaatcaattttgtttagatctcaagggaggcagagggccttccatctttcaagagttaagcagaccatgaagtccaagggtatgcaagatggaatgtaaagttctcactaagcttcctaggatccagggtaaatcaggaagcttaaacacaaatccccgtgtccattggataaacaatttgatggatcagggaagcacaccacttatgatactaagatcagaaagaaatttgtcctaagttgtgcataaagattaatgatatacatatataaatcatggtatctgctcaacttagtgtgtttgatatattttagttcctctcctgtcccttttttcccctatggatttctgtggaagattgtagtatatttgaaagttctttgaaaattgtaaatactattgttagtttataattaaaagaaagcggccgggcgtggtggctcacgcctgtaatcccagcactttgggaggccgaggcgggtggatcacgaggtcaggagatcgagaccatcttggctaatatggtgaagccccgtctctactaaaaatacaaaaaattagctgggcgtggtggcgggcgcctgtagtcccagctactcgggatgctgaggcaggagaatggcgtgaacccgggaggcggagcttgcagtgagcccagatagcgccactgcagtccggcctgggcgaaagagcaagactccgtctcaaaaacaaaaacaaaaacaaaaacaaaacaaaacaaaacaaaaaacctgtgtaccagatttcattaaaatctgattaaatactattaaagaaagtataataaaatagatagtataagaaaaggataatccaaataaaaaatatgtttcttattaaaaaatggtatgtcttgccaaattttgaagttaaaagcacagcattctcacttctttaacccaacttatagcccattatagcactagattttagaatcctgagtcctatgccatctgtaatggcaacagtcttacagggtgatacaaccttttgtaattcttaaggagacttgaatttttgaggcaaatgttgagtctatacgtggacatttgttgtgtaagagtggaagtggaagtcaaaattctgaacaaggttgctcccaataagatctgtcagctcacaagattgcttccctaggcttgaaatgtttcaagcacaaattcaattcataaggaaaatgagaatcatgaaaatgattatgaaatagcaagcagtctggaaagaggatgtagacgaatgccaaagcttctggaatttatgaaatatttccatttatggggccaggtgaaataagttgttctttcagaaatgtgtgacatggctattatatattatccccctaaaactatttgatcataaaacaaaacaacaaaaacaaaaactgataaacagcaatgacaaaacaactaaataaaaaagaaatgcagttcttgaatacaggatataaaggctcagtgcactttttcattttcttattatttcttttccctggctaggtgagttggctgttttatattggcactaagagtttgataccactactagaatagtcaagtatttgacctggccatgagtaaaagatgtttgattgacagatgagtctatctgtgtcaaacagctttaccttgagaaaaatcacaactttgaaagcagtaacacttcaaaagaatattgaagattgtggccactttcccccacctctccccaaaatctatcttcattcaagttcattataagcagctcctttgggtaatttgggttgcgtgctttctccaccccttctgtatccttggcttcttcagagcgtcaatcaagacaagcaaaagattcaagaaaaaaagggaaatgacctttcagtacctgagtcttcacaccaattcatcattgctaagtgctccaaaactgctgagtacagtatttaggaagtgtccagtacatcagcctggcatatattgttcttaacttgaggttactaatgcctattgcaaatgtgctttacgtcagccaaatgatgtgtttaaaaacctctatgtctagcatgaagaagaatctctttcattctcatgttaccttaaaagattttcataccaatatacatcagggaggagcaaatttttgtttcatatgttacacatgttatggtgcacatgaagactggaaacggtagttatttgttgggcatgtgtatgaattagtatgtaaaatacacagcatttttttctcttctaagttactaaatattagatatttaatgtatttcttttgctttgctaatttattcaaatgtaatcctgactaatccattattttgttaacatgtctacttgattaatgtgtttttcccctcttctaattctgatccacaaattttatagctattcattgtattacttaatctaagtccactaaagattatccttattcatgtttctccattaaagacaacgataatatcattgagttagcttagttcggatagaaatttggctagcattcattatttgattttcttggagttttgcaatttttttttttttgcatatttgtcaacattgtatactcctgaaagcattgtgtttaaaatacctatttcttgatcagtagaattgatatagctgacttacacggatcaataacatgattttaagagcatttcaaggaaatctctcatctgcattgtctttttttctaacacagtttgcactatttacaagtgaaaattttatattactttacatattttcctgtaaaaattagaaaactgtattctttggcacccgaatgtgtccttgaattattaatttgttaattttgtatgacatccttatttattagagaagcaataatatttctcatgggaatgcatgtattaatactttcagaggtccagaaagtatcaggagattaaatactgagattaaagagtactctcttcccactattatgttcagttctgattttccagctgtgtagctagaacaaagaaagaatgtgggttttttttaaagaataagacaaggctagaaggtatgcccttgtgagggcgccactgactgtgtcatcacaggagggccctgatacatgaatattcggtctccaggaagccaagtatgatattcacaaccacataataatgtgctaacctcattcacggtaatcacagataatgtagtatttgtgtctgccatacagttttgaaggtaaaatatggaacctattttggaaatttcacataacatcttaagctgtattaatagaaccagaataacccaaaataaagaggtaatgaatgcacttgaccctgcatcattcagacctcagctggaatattgtgcttccttttgggctgcagacaaacagaagaggactcaggagagtgacaagagaggaagcaagctcatgccttgtcacatataaagtggttgaaagactgcaattgttagagaaaatgatgcagtaattgaaggatgggtactgggaagaggctagttctttgaggctgctaatctgaaatataacaagtggatgcacctgcagtaaaagagattaagccccagaatgagtctggatgttctaatggtcagaacaggcatttcatatgacatggcctgcattggtccaggtggcgaagtaaggatggacaaacatgcgttgtttgcaatgataaaaaatcataagtagatgataacattgatttgctgaaatttttctcttttttgtttggtgtaaaactttatatgtcgtactttttgccttgtggtttttttgtatcttaggacaaaggtattcttaatccctttctttgtcttcttgaaagatgcaaccatgcagaaaatgcatacctcctgtaaattgtttcctgtcttttagtaaacctttgtttaaatgagtcatatgtttagcaattttaacattttaacttggctctaattaatgataatatagcgtgatttatggtcttctaaagaaatgtagacatagaaaatggagatagaggttaacatgtgaagaagagtttgtattttgggttagaaaattaaatattggcttatgtcagtaagattaggccttactatttgattgtacgagtttactttaaatttctaggctttcagggctttgtaaagataaattttattttaaaacagctttagatttgcagaaaaatggcaaagatagtgcagggagtttccatatacccctcacccactgccttttattaaagtcttatatgagtatgatacttttgttacaatgaatgaaccagtattggtacattattattatttaaagtccctattcattcatatatccttagttttacctaaggttctttttttctattccagggccccactcaggataccacattgcatttagttctcgtgtttcatttatctttgctatagaattttctcagattttccttgtttttcattaccttggcagttttgaggagtactgattaggtattttgtagaatgtctctcagttggaattttctgattgatttttcatgattagactgtagttagtgttttggggagagagaccacagagggtaatgtgccatttttccatcacactgtcaacatgactaaagatgttaaccttgatcacctgatcgaggtggatttggtcaggtttttccactataaatgtattatttttccttatttttattattttcatacctaccctttggaaggaagtcatgataaacaacccacacttaagagggtgttatactccatctccttgaaggcagagaatctacataaaatatttgcaattcttctccacagaagatttgcttattctccctcatttaattattcagcatttatgtatatcagtatggactcatggatatttattttatgcttaggttataatccactactgtcatactaatcgtgctgtgaaattgttccagctttggccattgggtactatttcttgtgtccctttgatacatccccacaattgtggtggttttgttttctgttttttgtttgttttgttttgatgcactttcatcctttctagcattacacaatacttgaggcttatcaacaatataactccttcctcatcatagattcagccatttctccaaggagcacacgttcctttcattggaaaatggtattaaaaaccaagatttgagcaataggtgtgttcattgtttttgggttgtcatttccttttggccttcttggctgacagagcaaggacatatatttgtgtataccaacctgtgtatgtacacatatctaacaatcaggaagcataaatagatagatgatagatagataagcattagttcatactgatattttcaaatctaactcattaccacatgggtcattctagcttcttcctcttgcttatctataatcttccactccaacagtgaaaaactaccatccatcatttgcttacttaattgttcaattccagtggtgctgttccatttatccttactgaagttgaaatacataaatataagctgaatttttctcaaacccttagaaaaattatttttcccccaaaatgttttttaccctgcaaactcttaagattttaaaatgtatttgtgtcccaaatgtttttctgtacataaaaattgatatagtcaactttatattgtttgcagttaacttgggacatggataatggaaattctcagataattccacaatttaagtttatctcttgctttcattatttctaatcagcatactctccatatgacaactatatctatgataagaaaattgacttctttacctataaatctctgtactttcttgacagacaccaaagaactacatgttgactgtatcttgctggtaacttaaggagaatagtaacttgtagtttccacctttagcaactggacattggccatactctgatttaccaagagagtccttgtaatcacaaaggaaagcagcgatttggcttcagatattaaagcaactttttttgacgtggctagatggttaggaacacactgaagaatagattttcagtaatgagccatactttcaatgaacgtcccaaggaaaacaattttaagatcttgcataaaatagttcatatgcctcaaatttgcatttaattcttacattaggttgaaagctcatgtagaaaacatgtaatgtaaaaattggagagcccaagaacacagtcatttccccttgggtgctaacaaaaatatactacccaacagtgcctttgtttgcagtctaatattttagaaggaaaaaaagaccccacaagcaaacatgttttttttttcttagtccagaaagaagaaatacagtgtgaacataatacttagggtagacaaaatggccaaaatagattaagttggcatcctttttagctgcagcttccttaaccttgtaccacaccctgacatcatcttcctacatggccacacctcatccccccatagccaaacattatttgcattcatcactcattcgtagatgccaaatcagacatggttcttgcccctatggagtttatgattaactggggaagacatgcattaatcaaattctctttctctctctctctcattctctcacacacacacacacacacacacacacacacacacacacacacacatgaaactgtgactggatcagatgctacgggagaaagacacacagggttcaaaaatctgtgaagggtttttttatctgttcagggaaaatcaggaatgtcttctctgaggatgagtagttcaggctgtgatttgcaggatcagtaagaattaaccaggaaaagaaggcaagagagagaaccttatgtggtgaatgaacaaatgtttaatataaaggcagcagaagagccagggtggaggcaggcacagaggtgggagataaggctctggtggccatgctaaagatccttacttcaccctgacagtgatggatcatcacaacatttccaagatcaagaatgcacttcccatctgtgtttcctctaaagtcaaaatatggcccatctttcaaaaggaaaattcaaatgttacccattcagtcttctaacactttcatttcctaatctaattagaaaagatcattctggctaagaggtggtatagtagtttaacccacccactcatatgcatgtgtttgtatttatatataaaattttattttcacatttctttttcctagtggcattagcaaaagcactcccagtttcattgagtctcttttaagttttgcttcccctctcctcctctcttcactatgctctgctgtcttggtgtctccccactactcatgtactctccctccatttctcaattctcatatgaggggaggtgccccagagggtgacgaaggacagtgtggcagaggacaggaggaagaaaacataggcacagctgcacttcagcattctgaagctgtaatcatcctgagcatctgtccagggacttccttgcccagttgctttgccatctgtacttgaagccaaggagcatcaggtgctttgcctttcctcaccaggcttacgccatagccttttcaccccactacccacacctcccagtgatgctgcaactatttctcctctgggctccatgcagtaactttctgggtttttttggttgttgttttagagcatttttgtagacagggttttactcagtcatccagactggagtacagtggtgcagttatggctcactgtagccttaacctcctgagctcaaggcatcctcccacttcagcctctcaagtaggtgggactacaggtgcaaaccaacatgcctggctcattttttatttttttgtaaatatagggtttttccatgttgcccaagttggttttgatctcccgggctcaagcgatcctcctggttcagcctcccaaaatgttgggattataggcattatccactgtgcctggcccagtaactttctaaatagtgtacaggcctccagtctcaccacctgtcccattctccttctctttccttctgcagagacctaagagccaagcggagcccatctccttcctacacattcttccagcctctttaggacctgatttcacaacctcatgtgccacaccccagctgcaccctcctggtggaaagtgttttgcagcttcttaaagatatcattctgcttcattcatcaacctttgtccatggtgttccttctgactagaatgtgtcccccaacccctttgcctggtgagaccctcctcttcctttgagacccatcagaaggcttgtctcttcttggaagcttctcaccccactccagtgctgcatccctagtttctgtgcatcccctgcaacctgtgcatcactttttcaaacatcgctcctcaagtagcattgtgcatgctgttttcttgcctttctcactcacacaaatgggagtttcctgggggccctttgtcatcaccacctgcctgactggatacactaacactcagcctacctgccacctacttggaaccttacaggtgtttctttgattaattaattaattcatgttttctcctcttctggtcagttcttccactttacctgtgcttgtttggatatgcagagctctagctggcgagagtgtccttctggctagattgtctcaccaaaaagagaatgggttttccccatccgggtgtctcttaattttttcttccactcgtgtttggacaaaattatttattgactggaaggaccacatggcaactcttcatggctttgaggccccttaatgagtgtccaagggagattctctctcacttccaagttcatggcagacatttacctacccagtcagcttgaactgagctcatagaagttttatttctggcttttgcggatcattttttatgctgttcctctcacctgaagctccctttctatctctccctagttggataatagtacacatattaaatgtgtaccttgtaccaagtatgctgagacctgcttataactaattttgcttgatcttcatgaatagtgttttgaaatagcatttttctatccctgcagataggaaaactagaaaacaaagaataagtaacttccccaagctcacatgacttgtaagtggcagagctgggatttgaacccaagcccctctgaagctaaagcctgtagagtacatgctcccttcctccacatcacactgcccctgcttgttcacactcaatgtgagaatccacttctcaagtttgtcttgcttattccaacctgttttgcaatgaatctctttcaacagctctatagttcctggcactcacttggcatccatcattttctatgttgtcatgtttggtatcttttcatgtatgtaatgtgcatctcttcttaggagtaagaccagaacttttctgctctgcagttttctccctgtgagggatggtgaaacttggtggctaagagcatggtttatacagacagacttcttaggtttatattctggctctcctctgtacttgctgtatcagctagggctgatgtcttcacttttttatgattccatttctacctctgtacaataaggcaaatatgaatacttacctcagagtgttgttgtgaagatggaatgaattaatggccataaagcacttacagctgtgtctggtacatagtgaccactcactaatggtcacttataattccttcacaacctgtaagggtcctttccacccaggtgatgtccctatgtctcaactgaatgactggttagggatatctttccatgggctactgtggctgcagataattgcattcttatttgagagttatgttaactagtgtgggcttttatttgcttctctctttctatcaatgagtcctgctgcttcaaccctgggttaactgaaatttgaaacctttttctactcaaattcctttgatgctgaaattcctctgcggtcacagctaagcactttgtgtggtaaccttctcttctgtcctcaggcctgctgagatcatctgctcagcagcatgtctgacacctgttgccacctcacccagccacttccttggtgacctggcaatgcccagaggggccctgccagcttggagccctgtggcaatgctgtttgattcagcaaactgatagccttctgacatcctttcttcattttagcagccaaatcacatgcaccttaatatttatcaatagctaagcaacaccggaaggaagtgagacagagcctctgggctagtcactatctctgattttacagaatggttaagccaggtgtaaaatatctcacaataacatgccctgttgtcctgaggattcaattccaccgagatataattaccatatgaggaagtgagaaatagggtttctttctaatacacagaaaatagaaaataagatgcttttcttggccactgttatcagtttcctgttaaggttctgctttgtttaaaacagtcctgttttgcttaaaaacaaactctaaggaatttttctaaaacatgactcaacctaactaggtatatatactgtactttaaagtgaacatatttgaaataattgtgagtgacaaagagacggaaaaacatagattttgaaactagcattattctaatgatttttatcccagtggtttatttggaaatgaatttccattcacaacatcttcatttgtcttctaattttcatgcaatttgaaagggttagtttccttacccacaggatcatcctggtcaaatctcaaaagattggctagggcattctgattttacaggcaaatttatattttgccgtttcaggaaataattccttcatggttatcttttataaagagcttatttgtataatatatacacatagtatatatcaaataaaagatctggtgttataaacataagaataagcaatttcccttttgtgataggaatatgaaattccttctggtagaggacgtttaagagcatgtccaaagaatggctaatcaatgaattctctcattttgtaaggagacacttagatgcatttctgaaaaaaacaaaacaaaacaaaacaaaacaaaaaacactttgggctttctctgtattcttcaagcatttctaaacatttattgacatatgcagtagagaaaaactggtatcaggaggaaggcagtaagtagccagcagtcacaaggtacaaagaataaaatgcatgcaaacatgtacagtattcactttcaggagttaatctacattttatttaatttttttttttttttttgacagcgtttcactcttgttgcccaggctggagtgcagtggtgcgatctcagctcactgcaacatctgcctcccgggttcaagcaattctccggcctcagcctcccaaatagctgggattacaggcatatgccaccatgcctggctaatttttttgaatttttagtagagacgggtttttgccatgttggtcaggctggtctcaaactcctgaccacaggtgatctgcctgcctcggctgcccaaagtgctggaattacaggcgtgagccaccatgcctggtcccttttaaaatattttaacactgagaccatattactgatgtactacttctttctaaaagtaattagaataaatgtacaccctcttctttaaactttgcatttttcaaatttccaaaaacaaaaactaattataagtaaatccataagcaaaacgctgttaattaccacttccaaaatctggaagcggtgacttgctttactaagacaagaaactttagacaggtgaatacttttaacaaggaacacacttaactttgtctaattgagcaaattacaaatcagagctagtagcttgttaattataagaatatctccattacttgaatacgtgtactagtcatggtaggcaaaataatactccaataacggacgaccccactgtggatctgagaaccccgcaggccagcagtctccatgtgattgccaaaagcaatgccgccatataaaccacaggtgtctaccttcaccatgacagaagaaagggttagagattccagaagtcacaattaaatgcttccaccccgaaaagtggatcatatttcattttccaaagcaatgcaactttgttaacctcaaagaggcagggaagtacaattttcctgtggggttggaagaagaaaactggaaattggtgaacagttttgaaatgtctgccataacttttaagtgaggaacttagtgttctcttactctgtcatgtttttaaatatctttttgattgaaatctttcaaggctttccagatccctgaagataaaatacaaactctccaacaagaccttttggccatcaggaacgcagcacctggctctctcactagtatcctctctctgtttgccatgtcccattaagactgtctccagaaacaatgaatttattgttgcctgtttcctgctagcttttccccgtatttacacagtttgctttatctgctgggattacccttccctgactatgctcaatctctatctcccttggcaattctcctccaggccccagacctgagaactggaccagtgctctgctctctcctctgagcttcaccacatcctgtgaaaacttgaacctaattcttactaggttttaatcaactgtttacctgtcttttctccccactaaagatgaaaagtcgcagagatagcggagaacaagaaccagatctcacagtcatggtgccaaaagagtatctaaccctgaattggagttcaatacatacttgttgaatgaatgagtgagtgaatgaatgaatgggttttttttgtgctttcatctacctgattggtagcatattcaggacagtatgtttttctcacctttttacatgctataagacataaaacagataatgcgtgtagtgggttcataataaaggtttaaataaactttacctacagttttatcactaggaatatatttctgatatctattacctttgaactttttatgccagattatgtttaaaaacatggtgtcactcgtaagccacatctgggactgattttcatggattgattaaactttacatttcttcggagtattcactgccaagcccctctggtgccatgtcctaaaccaaatatttcagaaacattgcaaaacaaggctgcccttgtgctttggaaacgctttcaaatgacatgccattcctttcaacttgaatctattaaagacttgaaattgtagcaatccattggactatatgtcaagaaactggtatttttaaagggtggcatgtttcttcatttatatgtaaattatttccatgtgctttggagagaaaaatggaaattttgtgaacgtacttagcccttaaagaatgtgattgatccttgatgatgtcgttccagacaacaacaaatacacaagaactctttttgagtgctgtaagaagcttctcaaaatttccagtataatcctaggaaaacatttttttttaatcttttctaatcaggaagtctttaaagtgtattttatcaaaatgttcagtattgtggaaacatactcatgagctattagctatagctgacttttgaggttataggtgaaaagttttcacatcaggaagtttcatgtagaacaaccagcgtcattcacgctcatatctgtggcttatatccaagagggccactggaggcttaggggctttgaagttaacagcatgaaacttctccaaaacaaacatttaatttttttctgttcgtttccttaaacaaagtccatgtaataaatgaaataattttgaagaacattgtaatgaatcccacataccagtgggtcccaaattactggaaatcataacatggctcatgtgaagaaagaattatactattttcaagctgttgtatgttaaactattatagtaagtagcataattggcatatattttaggccgtattttcaataaatcaatatttttgctcaaaaggcaaaatttaataatttaataatctcataaggtgaaggatggacaggtaccatgttaggaatttgacatgtgttgtttgctaatagactcatttaataaatgaagtaaatgatattaagcagtttcctcatgaccacagagcacagagccataatttgatttaaatatgagtatttctggctcatgctctttctctttctacctattgccattagtgaaggctgcatttagtttttttttcaagaagtgtctagcttacaattttgagcttcactacccccaacctcatacacacctcatgtggcttagagctatataaaatccatgttttttaaatacttctaaaattggacattcatattatgtgtatgatgttttacatatagtatgagtgcagtgaaagttagtttccttaagttttcctgaattcagctgttaccctagcatgactgcttcagcgaagagataagagcttctttgactttttccactggaatttttcatgccagaagaaattgaacatgtgagcctggtgtctggaagagtagcctggatttatggtatcagatgcacatttttaacaccttcagttttctctttaaaatatctcttcaatcccttacttttctctatttgtttcaacattaaaatatgttatttttcttcaaattgttggcattgacacctcttctacaattcccagtcatctgcatgctactgcttcagaggaatagtcttatatatagaaaatactttttttttctcagcacatttatatctaaacaagagaatgatatgcttttacccagttatctgcgtggctcacttccttcaaggcttcaccccaaagctacttcaatgtaacattttctatccattagattgagaactgcagttttaatccctaaccccactcccagactcccctgctaaagttttctctattgtccttgtcattttctgatataccttctaatttacctatttattttgtttaatattcatatcccttcgactggaatgtgaactccaacaaaagttcatatttattgtcttgttgtatctccatagctacagtagcacttaatatatagtagatgctcaggaaagatttataggaagaaaaaatgaaagcatggtttgcaataaatctaaatctataaacattccttttttagtagtattgttaaaccttacggttcctgtacaaccaggtgtatgccctctagagccaccaataatattccaatattaaatatacataattttataaacaggtgtgattttaatgtctctagacctttccaaccagaaaagctgaatccaggtactgctggtctttttccttccataggttctcattttccctgatgcagttattgccttttctgtttatactttcttccctttaggtgacttcacttacaaatataggaatgctgattcatgtttagcattgtgtggtttcagtatttattttctgtatttccacattgctattttagctcattctttaattaaataaaatgccttattctctcacagtatcagcaactaaaagaaggatacatcacctacagttgttagtgtgaactgcttatattaactcataggatatatattggtagacataaacctactgactaaattatttctgaagtatactctacaaaccatcattgtatttttacatttgacaaagtggaaaaaaaaaaacctggccacaatctttaaccctgcccagtgtctctggcttttaggcacacagccagtcggcaatggcggcaggggtggcatataaagattctagatctcaaaatgccaacctggccagaaaataaaactcactatgtgataccattggaacaagcttctataccaatgtagggggtgatggaggataatatacattgcaaatttatgtaaaaccagaccatgtggtatttccaatagttgttacaacattgcttaaaatgatataaatggccttatggataaaagtagaagtttaattttagaatagttcctattttaagactagatttagcaaaaatccttatggcatatgtttactcttggggaaccttgagagatagtgaacaagaaacgttagatcatagacttcttggctgcaaaaagtttatttatttcatcattttactcgtattccttttattatttgaaaagctttgtataaaggatttttagagatggcatttcattaaggttatatttattagaaaacaaacttgaataatttaaaattacaaaaggtaagtcattttatgtatttgcctacttgtttttgttttctccctgccaccctccctttcttcctttgtccttcccttcctcccttccatccttccatcctttctttattcatgccctgcctatttagaaaaggatttgcagtaagttacaaaaagtacaaagtcaataatttttttttaattcagaatgttaaaaagagaaaattgggtgaagagaaagtgaatatttcaataataagagtcatagtgcttcctctgaaggagcccagaaacccatctcatagttacgtggtggccaaacttagcaggaaaacaaaagaaatgctagacgagaagaacacaacatccatttctcaggaaagactaagttttcctcgtacagaaccctgaaatgtattctcccctgggatactgtttggataaacagtgagtgctgtaatagtcaatgtctttacccactgcttcacagcaaagcagaattcccaaggtaagaatgtgaccatgtaacctcattgcctcaccattgttctctccactctaatatttcagtactaaatgtgtgtgtctcttagggttgctgtgctgaataagtgagagtcacctggcacagcagacatctagtgtgtgctaaagaaatgtacagagaatgagagagaatttgaataaaaaatgtaaatagaatattatacagaagttaggaattaattcacaagtgtgtaagagatactctgtctcagatgtgcaggccactagtagtgcagtgtgacactcactgcctctcaagagaacttagtagtcagaaaagtgaagaaatgacatagcttttttacactatattatgtagaaagcttattttttaatgttaaccaagagcaaggtccataaactctaataccttccagaaagcacaaaagacattgagatacatttagagaaatagaggaaactgagctagatattcacgtgaaataggatcattccacatcttccagcaaataaattgaggtgaccaaggtcccagggagcacagatggtcatattctaatgaagctctggctcaaaaacacacaagctgaaaacaaggcgaggatgcttcataacaatgtccttttgtaggagaagtgaggattagtgatgagggtaggagtggagcaagagacagggattaatttgcatagccaccttggaatcccaaactgtcaatggtgtcagtgatgctgtttgcttgagtccctaaagggttgaatgaaagaagttaactagatacagagttcacagaaggtcaataatcttagctttccaacaagttggagatcggggtaaggagaagggcagaccttaagaaaagagttatacttattgccaggaaacagtgcttccttttgctgtttttccacaaacagatttacctttgccctatgcatttcatcttattttaaaaaacaaaacttttattttaggttcaggggtacatatggagattttttttaatataggtaagctcctgtcatgggggtttgttgtacagattatttcatcacccaggaactaagcctactacccaatagttattttctctggttgtctccctcataccaccctccaccctctggtaggccccagtatgctgatcctctttgtgtccatgtattttcattatttagctcccacttacaagtgagagcatacagtatttggttttgtgttcctgcgttagtttgctaaggataatgcctctagctccatccacgttttgcagaggacatgattgcatttttgtatgactgtatagcattccattatgtacctgtaccacattttctttatccaatctgccattgatgggcatttaggttgattccatgtctttgctatggtgaatagtgctacaacgaacatatgtgtgcatgtgcctttatggtagaattatttatattcctttgggtatatacccaggaatgggactgctgagttgaatggtagttctgtttttagccttttcagatgtcaccaagctgctttccacaatatttagtcttcttacacccccaacccccttggaagtttagaatggaagcacatttcttcagatgattattaactctttgctttttctgtttttactgcatcatttaaattatggtgtggaacatcgaaaagggccctaaagcctctattgtcaagtatgactgacctctcttggtaaagcgagacctagttctgactgagattcctccagtcgtttcatggttaactttccattcagtttcagttgtatttcattgtgtttcctgcccagtggagattcagcatagatgacacctaaggaaaaatgctagtcatagtgtgagaaatcatagccttctctttcaaatgcttttattcatattcctttggacttgattttagatattgctcgccaaatttagccatctttcttggtagacatttctgaaagtttagtgattaaaagcttagagtctagagttaaatggagtctagagttaaatagtctgggtgtggactctggcctggtcacttgccatctgtgggcaggccacttctttaagcctcaattttctcccctaaaaaatggagggggatgggggccatcatgatacttactttataaagtggttgtgaagattcaaggagaagttgatacatataaagttcttagaacagtgcctggcaggctgtaaacaactataaaaagttaatcattattttcagaaaaaaagttgagtcaaacctgaaacagtggtacaatgtcaagagcaggaactttgccttattaattgtgtcttcctaactctatggacttaggatctgagactctagttcctacaaactcatccatcctggggcctggcatatgggagctataaaccacatcagccctcctttgctctttttccttagggctgccctgaggaagaaagctaatgtgtataacatctagcattatgccaggtatgtggccagagctcaaaaaactatagctattattgtattatatactttgctctattttttatactcctggttaatgacggagagctctgtgaggggctgctagagggaaggttcaattattttagaagctttagttcttccacatttcactttgtaatgtttgccttgccttgtatttattaaacaatagtttactatactcgttcctaaaatattaagtatagcttattatgccctgttaatctttctcagtggcatacaataatttaaatatctgcttgaaaaatctcaccaagcattcattttaatgtggcttagaatgttatataatatgaaaaagtacgtgttctttcagaaattagttccaaagaactccctatatctagagacaggctgtgagaatggagaaagttgaggagtgtctctgttaggaatcttactactgcttttaaatttcatggaacacctattaaattgcttcgcagctaggttatgaggaaggggagccctgctcactcttttaaagttaaaagtgaaaagttacttgcgggtgattagggaaaaccatctcagaggagtggactgttggcatggagaccccacatataactcttgggggatggcaaaaacttgagagaggatgctttatttctcacctcctaaaatgcctttcccagctttctgtggtgagagagaatgagacagcagtcatacctaacagttggtgaaacagttctatgggagtgagggaaagtgaggggcctaggatgagtcagaaacatgtacatacggaaagggagagagacaatcctgattaaattgtgccttcttgcaaaaatatatatatttccacatttgatacaaagtgaagtatataaccttgacaaagcgatatctgtcagaaaaaaaattagaaaaattgctttaaataaacagtccttcaaaagatgtcaggcacagagactttctgagaaaatgtttccaaacttttaaggaacaaatagtatgttatataaattttctagagtttgtgaaaagaaaatcaacttttcaattcattctatcaagtagacctatttgcaataagaaggaagtccctcaaccaatcttacttttcggtagataaaatcttaaatacaacttggtaaattgaatcttgcattttgttaaaagattcatgctcatgtcaaataaggccgagtctgtaaatgtacatatagttaattttgatcaaatctggtcacagaatccatcatattaatatggtgaaagaaaaagcaatagacttgtattgacaggtgccacagtggcatttgactaaaacttaatatccatttgttgttagttttttttaaaaggatgcagtgaaatagcaacagaagaatatagtgtttatttcaatggtgaaaccaatttttaagtgtgagtcgtttctattaaagtcagcttagttataagcaataagacgtaacataatatttgtatgtaatatttgtttgggaagttgtatagttattgtcaagttattgttctagtacaacaacttgaaacataaaatataaaatgaaaactgactttatagctatgtgggtatttacctggaagagccaaaggaattagttgaaatgttattagaaatgattcagtaattcagataggtagccaaatacaaaattacatataagaaagctattagcttttttatagaaagtaataatcagttagatattataatgaaaaaaataaaatacctctttatttacttactttcttactgttgtccaggctggagtacaatggcacaatctcagctcactgcaaccttcacctcctaggctcaagcaattcttctgcttcagcctcttgagtagctaggtctacagacatccaccaccacccctggacagtttttcaaaaattttttgtagagatggggtcttgctgtgttccctaggctggtctcaaactcctgggctcaagcaatccgcctgtgttgacctctcaaggtgctgggattataggtgtgaaccactgtgcccggccaattctttttaaatagcacaagattctagtcacaaaaacatactacacctatatttatgagtgaaaataataagaaattagaagggtttttttggtattgttgtgaagaaaacaaaaatgtcttaactaatgctaaacaatccacaatattcattccactataggcaattccaatcacattttatttttgattttaataaagtatttcaaaaatcaagctaacatgggaaaatcaagaaaaagttgaaataaagcacagtgggtaaaggttggaaggatgtagaacacaccattccagagattatatcataaaaattacagtaacatatatcatgtaatatataatattgtaagaattaggacggtggctcaaatgaagaattagataaagttgatttggatagactatagatttcaaataagactcatttatgtatttgtgtgtgtgtgtgtgtgtgtgtgactgaagtagcattttattcaatgagaaaagggatgattattcaataaatggtgttgaaagcaacagctatcgtttgggaaaataatataaagttagattctttctttaaaccttatataaaaatatacattggatatatattttattaaatatttatttaaataaagatttcattaatatataatatataattttattaatgtaacaactaaaaagtagtttagttaaaattactaaaataaaataaaaatgagtatttaaatttcaacatagggaggatatttctaagcatatcactagagcgagaaagcatgaagaaaatgtctgatagatgtgtatacattaaggaatcaaatttttctacacatcaaaaacaccataaagaaaacgtaaaggcaaatgaaaagggtgggattctatttccagtgttactaaagagacattgactttaatgtcttaaaaatccttagaaatcgtccaggtggggtggctcacgcctataatcccagcactttgggaggctggggcaggtggatcacgaggtcaggagtttgagaccagcctgaccaacatggtgaaaccccgtctctactaaaaaatacaaaaattagccaggtgtggtggcacgtgcctgtaatcccagctacttaggaggctgagataggagaatctcttgaacctggtaggcggaggttgcagtaagctgagtcatgccactgcacttcagcctgggcgacagagtgagactctgtctcaaaaaaaaaaaaattcttagaaattaataaggaaaaaaatgacctttcttccaggaaaatgaacacaatccataagaaacacaattggtgagttacatgaataaaaccccaactttaaagaaatacaaattaaacaatagtgaactaacattttctctaaagagtattcaagattaaaaaacaaagtcaaaactagatgataacaaattcagcgtattgactaaagtcaggacattcttattcattagcaatgaaagtgaaagtttgagtagctttctagaagagaattcaagtcacactatgaaccaacaattttactttgaagaatttatcctaagaaaaaaattaagaatatgtgaaaagatttagttacatcaatgtttattatagtggaaaactgaaaatgtgccaagaaaaaaaatgagccaaatattcagcagcgggaattagcacaatataccttgatatgttatcaaggtaaatgtgtatgataggatactgatgcataaggataatttttaacatggtagattttcattatgttaaatgaaaaaataaaaaatacataaaatgagagcccatttttataataaaaaatatatagtcattcaaggaaaacatgtagacggacatcacaaaataccaacaacaggtatggttcaaagtgttataggtggttttcagcacatagattacccctagcaaagagacctctgtgacacttcgtttcttcatctgtgaaataaaggaatcatactagattagttctaaatgcttttagcaaaaatatttcataattctatgagtattgatggttaataaccttgagaaaattgttattatttattgaactttggagttagtagagtaaaaccaagtttatcctgagctatcccttgttttagttaaaattagttaaatttaacatcctgatgtttatttataaattgtgcatgtgtacatgtgtgtgtttgtgtgtatatatatagcgctttctcacaaatgcctgttttgctgtggagtgggttgggtgggtacagagtttcactgaaatgtatattcccctatagaattcttagagacacaaatatatcttgttaataggttatatatattttcatgtttcatctaccatttgaaaccctataaccatttgaaatcattcttggttttggtaggtttctttaattaacattcacattgagaaactataagagattcaacccttgaaaaagtccttttgctaaagagatttgcatgtgctctaaaaattggtggaaaatggttctgctctaatcaaacgaatgtcactctactcttatttctagctaacagtaaaactgcctggaaaatgataacgtacaacaaatatctcaagtggttatttagtaccttgttgtgatagtgaatgaaaaacacactcagttcactcagttttaatttgctgttgaacacttaacatttcacagtggctggctgtttggaggccatatacaatggtagaaaaagtagctttctaaaagtgctttgcctcattcttgcttaacctggcagacgtcatgaacttccaagagggaacatattttatttgccttataccaccagaggacttggccaattattgctatttatttaatgttggtgttgacatagtgcctttgccctgaggagctccaggtgctttataaaattagtcagcaattcacctcacagcctttacgccagagagtgaacattgaaaataataatgattcgtggaacctacagccacccctaactcctatttctgtttgcccagtgaaacagaacaaatatgcccagttccctcagagagctagcagaaaaaagttctagtggggtgtcatgggagtttctctcttgtgtaactaggtgaactcctgtaaggaaaatttgccatgcaccctgcagagctgagacttactattctctgttgtaggacccatactttccccagtaaggaactccattttttttcaggcctttgctcaaatatcactttcttaataagacctttcatgaccatctgtttttaaaaacaactaatcaaaacctatcctcaagtgcagactttctgtatcctcattcctgcattatttttctctgtagcacatgtagctattcagcacacttagatttttatttatttattaattaagggttgactccatcccaccagatcgtaagctttatgaaggtagaacatttgtctattctgttgagttatgaatctttagaacctaggtgggtgcctggtacctaatgggtgtgaaataagcatttgttgaatgaatgagcgaaggaatgaatgaataaataaattttccccagtggagcaacaagcaacagttggagtcccttgttgtcaatcaaatataaagatagcaaagagtaagtaagcaagagtgaacttgcatcatatcaagatttcttttatattccttaacattgaaaatattcatgtggtgaaatacagtattagagttttctcctttagttgcaaataatagaaactgaatttaagccgacttaaacaaaatagcagtttgcaggatcttgaaactcaaaaattcaaaggatacagctagttttaatggttgtgaggattgctgcaggccctctcatgatttgattgagcgtttgtctctgtctttctctttctctccttctgtctcactgtgtttctaagactttctctatgtggtagcaaagaaagctcagacagcacaaggctgcctgtagtaattcttgtgacatgagagcatacatctcccagtagttccaaggaaaacccagggctgacttgaaacgtgtgcacttggattacaggtcaaccttgagtcaattgtgactgactgaccaggcctctgtgtgtcccggttgtggaggtcagttccatcagtaggagggggattaatcaaaggaaaatcagaattctttatcagaataagaggagaagatgcatgacaagtattcagagatacactgtaaccagaaaaaatggtcatatgtgaagagtatctcattacaacagggaggaatgtagttctaagtcttttaaagttctgctttcctataatatcagatgaccacatatttcacagcataattgtgaaaatgatattttgaaaggaaaaaggaattcttatctgagataaaactgtcaaaaaagtcaaaatttggctgtgaaaaaagtgaacgtttacttgaggttgtcattacttatttccttcttatataattcatataattctatattattatgacattcatataggcaaggtgttaaattctaatttgattttataatttttcaaaagagacttagaatgtgctagaaatcctaaaaatttctgttccaactattggtatttgaattatgtatatactgcccctttttttcctataaaaaactgatagaagttcatagataaataaaattcacagataatgttacaaatttatttcaaatgttacttcttgcctttttctatgccaagatacttaacaaatacttcaaaattgaaagtatttttactccttattttatctattccacagaatagttagaggtagaggaagaattagataatatatttattaataagtcaacatcctattaatggatgaacatagaaccaactcataggcaacacagtcagaaaatcaaggtgtggcttggttggcatgaaagcataatgcccacaagaactactgttgttggttatgctgtactgtatgagaagggcatttctgacgttagctttgatactagccttttagtaactgagtaaagttagtgagtatactcacccagttcagattattaattcagtactaactcagtaatttggtgttactacatactgagatatccagctggattcaggatttgctcaattcaattagcaaatccagtgttaaggggaaaaagaagctttgtgggtaagcatttctaaattggtgtttttatgaagccacaatattctggtagttcgtcttttccttcagttctctgaagttgtaatcatttctaaattgttgctttctaggtaaaagatgtgagataggggaaaggaaggctttcttaggaattttttttctttcattgcccagttaaattggatttgtgatttatatccattcatcctattcatacccatcatatatctgtatacatctgtcatatatccatcctgttcatatccaatccaattcataagacttttccatatttttcgtgagattagatttttttagtgggtgagaagaaataaaaggcacataatattaacatgctcctggcattccagcaacgaataatgccatagcaattttataaagattaaaaataccctagctcactatgattttgatgagcgcaacgcacttttggctttgtgggtcccctcctcataaaaaatacaaaattatattttgtagctgcatttatgtaaagataaatataatctaaactgttttgtactcattttttcagattttaaaagagatttaacatttctatgagctcctaaaattatgagctctaggaatagtgcttactgtgctattggataaactaagctggcattgtcatagctaaattggttacattttaagctgtgaatgaaagggaatttggtaaaccaaacaactgttgtatgcttattgttcattccagtataaatatatttttgctattaacattagttattacaagtggaatacgaaggggtggactcagggtttggaaagagagttaatgcaagtgagtatttgactccatcaacaaaactttacaagtaaaatcctcaggttttgtgcctgtaatctttttacaggatttaatgctattttacttcgtcaacaatttttttttcttcaaagatttgtatttttaaatgactgatgctatgaaagaaaataccctcatgattatatttatattgtgaatttttacagtaggggcaaactagaatttttcatgcggagagcactttgggttttactcaatatagctcttcaaagttcttcaaagttcaaagtaaaaattgatgctagagtaattttcctgtaatctaggtgaaaagcccacatatcatttaacaaagtaaatgctcattcatatttaatacaaactcttttttcttctgttgaagctgacttttatccaatttttagtttccagttatctatggttttgggaaacagagctaatttggattcatgaattctgtaaacaagtatttcttgagaagctcctggttgtgaactacctagaatgaaactgggtaaactaatatcaacatccattcttttgccaaacatcactgataaactgcaacatttttttttttacgtgagtggtcttggaatcagacatttctgcattgaaaacccagcactgttgctgactggctgcatggcctgcatctacttctcacatttctgactgcctaccaggttccaggcactgttctaggcactgaagatgaaaagatgaataatatggagttcccatcttcaaagaagttacaattttaaggaagactggcaaataaaagttaccccacaaaataataaaaatacaggggtaaaactagggcatagttatattttggctggtctctttacctctgaggttcttttgctttttatgtaattggattttaacctcagaagactgtaaggttaaagatgataatgtataaaatcagtactctgagtaatgatcaaaattttctgttgccatccacacatttgagtgagatgtagtgagtgctagaaaataaagcagttcgtatcaaaaagggtgtgttgaaagaaataaactaatccttgagaaacactgtcatgcaatctcatatctagaaattgtgcctatgttctgtctataaattgatgaattggcagggtgttacatttaggacacacattgacactacatatgacatttgtaaaaacacttgctaattcagctaacagctcgcttctccccttctccccactactcactgtggagagagcttccagctaatagcttagaatctcccagactaaccaaccattgatggaaccaggtgctatgtgattgtaggaatttatttgttgctctgaatgttaactaaaagtaatgggcttcttattttgtccttttccttttgtgttatagacggcaaagactgtttctcatcagtctcatatagctaaattagatttatctctcatgctgactgattaaaagggttaaattctgggcacgttgtcccctgagtcctctgaaatccatgtcagaatagaagtgctcattaccagactcgatgaggagctccttttccagaacttctctctgctacactctaaggaccaagcacctctgcctaaattccaagcaaccatggcctgtggcagtcttggaacttttgccctctggcatgggtagaactagcgtcaattgggtaattcaatccctgagttccttcttcaatgaatgagagaatccaggaatgtgttgccagttgccttttccttgtacctagttttccttgctgcagaatgatgacagtctatttccacacctcccctcctgccactacaggatttatggtctgcatgccccagttgtgaagctggcatgtagcattttgttgccacaggcctgtgagtgtttagaagtttgtgtttgtatttccagggctacagtttgaatattgaaggaacaaacagcaaacaattcagaggtcaagctgtgactgcttcctcatttggagagcttattttatgtctgtatattctatactcagattcccacataacttgttttttccaccttcattgctttggttagatgctttcaagtgcattttttctctaagaaatctccatagaagagttgtttacttgaagtgatgggtgagcaaagtttgcctgacgtggaacctcagtaactttcccctaaggaaaagttctggcgtgtaggggtgggcgctcttccatccagacggatgggaacatagccaagcagccaggagacacattgacttgtgaccactgggaaggatgcctagccagaaaagtcccagcagctgggtctgttaatcttttctgaatgaaccagcaggcagttgacctctctaaacctgtcctggattcctttatatctttgtagtcacctttttaccccctcaagaattcccctataaagttgttcttaataagactctttttgcccacttccccctgaccttctgagttgaatatgaatttcactaattggtgaaagaaaccaccatgaccttgataaagccatttctactctggttcctcccttctaagaatttgttcattcaagcaagtatttgagtctaaatggatccacttggacattttaataattatcatgaacctcagtatccttaaagtgtggctaaaacaggctcaaaaaattcagatagtgtaatctactttctctctccctcctccagatttaagtggattaattcacttcactatgccagcacctgagtacagaataatttatttctgtgtcgtttcatgatgaaagtccagctggcattagctcaaattatgcagctggctattaattgaagaaaacttccctgtcactcctcagtcaaacatgatctgattcagcagatccttttcactctcatctcttctattctaccagtagaataaatgtaaataactttcacttggctctgcttgtcatggattgtaaattacctggcagcatgcagactgaccacattactgttttggaggcggcttgtttcagttgattagtatttctagaagagttttgcacatttcatctctgaggcctgaatgatgtccactagcaggaaatattgtagtctgccttttttcttacatactgtatactaaatttcaatctaatttcaacaagatgtcaaattctagcacctgtagggcaggtgttggtcttctatgaattgattatatgtttttctatcatactggatggtgtacaagcccaggttgtattttaaatagaatttcaagagagagatttgttctggaatttagaaatatatattatgtgccaaaattatttgatgagtgcattttgtaattcttaaaatacaaaactacttggcatgaagagatgctatagtatgttaacaattgtggaactttttcataagatgaaattctgtgcagaaatgagggagcagaattcttgtgggagtgctaaaatggttcatcaatttgatcctcacagcatatgagaattcaccaattatattactctctgaaaatatgtttcagtatcaagggcctctttttgcccttcctccatcccaatgtctgtactctctgtacagtgtgatcactgggtgctgcatgaccagtcattattatacgctcagccctgaaaatgaacttaagatggtaaaatcataccttgccaggatttgggtggctgtgagggattcagtaggattttagcaacagggactggaaaagaaatcagaacttggcagagaaaaaaatagcactaggatactagaagagacctgggagaactagcttgaccttagaggctggtcttgtgagtcatttgagaaatagtatcaaaagggcataagagggcccggcatagattaggctatttggggttacaggagatccaaagctagaaggggcaacaaaacattgtggtatgaggccatcctaatttgaacatcaggcacaggatctagtgtccatgaagtagatctcagggaatgggcagcctgagaagaagagtagatcatgcagaagccagcagtcacccctagatccagatctgagtgtcatgacctagatgcaattaaaatccttataatgggtcccaccctggcaggattctttcaggaactcaggctgagcctgaagtgagtagattcagctgaagggaaggtaaagaactataagttgatagacttgcaaaatggagaggctgcttttaggaaaccattgataatagtatcaatcccattgataatatatgtgattgcccttttataaggccatgtgctttctgcacaattatgataaagtatttagccaaacttgtattccctatataaagggggaggagatagtatcccatggggaattccttcccatattataaactggtagacaacttaagcaaaaatgtttttactcatatgaacactgttgaagtataaagccaggtatttaagtcatgataggtgtttatttactttgaacatttgccagaagtttgatgatgggtatatttgtagactgggtgttagaggttgttatattctaaaaagatatcttctgattaattttcttcatttataaaaacaatctattttgataacatttaatttatgaactttggtgtcatgttacactttatacattttggttgtacattccctgtaatgcttacagagacagccagtcaggcaataattgctacatactgagcgccttctattttctgagtactattgtaaattatagagataaagcagtgaaccagacagagtctccatcctaaaagagcctagtagaggatgggaactgatgtagtatcttgtaattgtcacagcatggtacacttgcttcttcagatgccattattaagggcgtcgtttctttaaattctgagatccctaactcagcttatgccagaactgatgagaattagaccttcctaaggtcttctttcttcctaaaatgaatattgaaataaatctataagataaaaataatcctaccaccaagccccaattaagactggatttttaacttgctcttctcagcacaatgacacaacagaggacacagaggttaatggaatgtctttggagcaaaggagatttcaaaaccaccagtttgttagatttgatgatcagctctgcaaaatgtttaaagaagatttcttactcatatcttataagttaagactataaatggtttaaatgggggaggatgtgacaggattgaaaatcttccccttcctttgtggctatgagaattcacactgagcaacagggaagagaaggaactagaacttggaatgagcctgtgtgtgggccctcattgttccaggatttacaaagggctacgctgtcatcatattaaataaatggctcctgctccttgtgccagcttaattgccaccttggctcccgaacaaagaaatcacaattgaggcaaaacatgttttgctattgaaggcaaaacctccttagagcaattttggggttgtttttccatttaattttttaacttgcagaaatagccctctttttttctgttttttggttttttttgttttcgtttttttaaatgatgtacacttgtgctgttaagtttcagcatggaatacaggctttatgtatttaggcagtaatgctgagttagatattggtaccaaaaaaaatgaaagaaagagagcaagaggacagcacatgtcaaaatgcctgatagaactgcatggacagaactaaatgtgcttccctactgttagttacacgtataagtcacatctcaaagcgtgttccccaggttagcatcaatatcacctaggaacttgctggagatgcaaattatctggttccatctcaggcctaatgaatcagaaactctaggtggaagggagcagtccagcaacctgcattttacaaagacctccaggacactctgatgtatgctagagtctgagatccactggtgcaaagaataccataggacagatgtacactaactaaactagttctgtttctcttaaaatgactttgacaatatttagaattttgaagaatggtatagaaattcatagttcgtgtgtgtgtgtttgtgtatgtatgtgtctgtgtgtgtgtgttttagcagaattctattttagaaaatatggggtagacttttatttagttttgttatttttgttatttttgaaaaattaagaggtaagcagagaagtatagccagctacttccataattttgtaggaataatgaagtttattctagcagaaagttatatcttatggaataacttctctaatattctctctagacatatattcttttttgaggcaggaacacaaaagaaaattggcttcttcatcaagttcaaagaaatggtgttttaattatgtagagaagtaatttcattttctcagagaaatgggtagacagatattagtaatttaactctcttcttaagtaatggctgctatagctcttaccaacactgaaagaagtagagtcaaatagatttaaatctggctagtgattagaattttttggggggtagggtgggtgaaactgtattgcagggaggtacgttgtaataagacagctagttattatgcactaccctccagttctttgacatgatagctaagggcatagacaaaaatctgaactctgtggtctttgtacatatctgcattcagattaattcacttaacaaatatttgtggagcacctaccatgggcttatcactataatgggctaaggttgtacagtgagcaagatactcacatatgtgattcttgtgaagccagaggtccagtggtaaagctagatgagtaaacatcaattacaatgaagtataatcacttccaggatgaggcagaatataggatgttatgcaagcagtcatccttgattttaggactgggtgatgtggagttcatgaatggttcatggaagaggcactaaagcctacagtgtgaatagaaattagcaagatgatggacagggcaggcagagacaagagcatatgcaaagttggaaagtggagagttcttgacattaccacattactgaatgtgcatatggtggagtttagggtgcagagaggacagttgcacatgctctggagaatgatgggagatgaagctgagaataatacaaggaagagaaaataacaggccttgctatccatgttaagaattccggacttcattccaacaaaagggaaagtctttgaggttgtagtatttggctgtgctgtagagagtgtattggggaaggacagtgctgaaggaaaggagaccagctgggacattgctgcaataattcagaccggtactcatggcttggaccagcagcaaggggagaatgaaaagtaaagagatttaggaaatagctacttaggaaatagattgaacgggaactggcattcaatatgtgtgacagcgaggaacaggaagacacttgggacaactagaagaacagtaggccattcactgagtttggggtccagcaagaggagtgagtttgagggtgaaattatgtgttccatttgggctagtagggtctgagaagtctgtggttgtccaagtagagatgtccaataaactgtggaaaatgcaatcccttaggcctctttattctcataaatacttctcatgctttttcacagcagaggctaaagccaaaaaacttttacagttgttgattactcccatagtgattgggccactactctcgatgtcagttttaagtgttatgtgaattttagcgttgcagaattttagcattgcagaatttttctgcacaaaatcctagaaagcaacttagtttactcagtgaaacctgcctgccaactaacaagacctattatttttcagttgggattttacttcaacagtggaaactatgacacaacagggatggtctaaccccaatttgagcactctgttctcattttcattaggaatcacttccctgtaatcataaaatggaaatatatttactgtagacatgttgtttggtgaaagcaacactaaaaatgagtagatgaatataacagctacaggataaaataagagttcccatttttaaaaagaaggactatgtttacaacacagctctccttaatgttatagtgttattatagcagtgaattttcaaataaaatatttaaattggaatgttagaagttttcttctatcatatcaaataagtggaaggccacctgtttgatgattacatattcaagtgatagttctcaaaaactaaagaaaaatctcatataaattataaatgattctgcaaagtttcacctaacattttctccatacttatgaagcttctgaagttattttacttttgagaagccacagacagaaaaattaatataaatgagataaatttcaactagccttgagaataaagagagcaaggatagtcatcaacacaattaagaatgrccaaatcctattaatgttttcaaattaccaaattagaaaagttaggaagcatgaataatttatttctgacaacatattctttttaatatctgcattactttggtckgctaaggagataaacctactcatgtgacataccatatgtaaacattttcctaattaataactggaaagcttctatgtgaaatacaaactttctgctcatacataatgtagactacaggcagacagttaagagttggtcaaagctgtcaaagcttgttttatggaaatctcatcttcttttcctgtgctctttatcctagtccaggtcctctgaattcttttactctacagtacttagctaatacagtgtttatcctcacattctatcatagcttttatattaaccactcagcaaaatatgtgtgcatgcacatacacgcacaaccatacctatatttaatcatctagtaaactatattaaatcttctgtaaacttcagataagcctgtttaaattgggggtgggtcgtattgtagcataccaaatggttcatataccaagtatatatttgtcatactatgtggaacagtattatatttaaaactgaagtcttatttcatgtaggttgtaccaaatttgtggtggtaaacattgtatttaggtcattcacaaagagtacagaaatacagattagccatatttttctatagtgccattcagtgtaataggtacacaatacatctcatattaaagaaaaaagagtcttttcaaaagcctgtaagggtctgaataaaggtcttagaaatgtgtcataacagctgaaatctaagagatttggaaaaagtgggagaagttaaatattgcaaatgcatagagctaagacttcttcattgaaagttgggtagttccaacattcatgtggaaaatctttaaaagtagccaaaaggtaattttttttttttttttttttttttttttttttgaggctgagtcttgctctgttgcccaggctggagtgcagtggcatgatctcggctcactgcaagctcygcctcccgggttcacgccattctcttgcctcagcctcccgagtagctgggactacaggtgcctgccaccacgcctggctaattttttgtatttttagtagagacagggtttcatcgtgttagccaggatggtctcaatctcctgaccttgtgattcacccatctcggcctcccaaagtgctgggattacaggcgtgagccaccatgcctggcccaaaagctaattttttaaattttccagatagaacttcatgtgtatttgatatattccattttcgtgtatccaatattaccaaatccatggtatttttattctttgttttagatattctaatcatttcacagcactttcattacacatctgcccagatttcctgttgctaaatttcagacactattctttaagtcttggaagagatcaactttttcagcacaacccatcccaaacaatgtaatgttactgtgctatattaagacaacacatgtgctgatctttttcaggcatttccagaatttttattgaatgtcaagtatgtgcaaggcaaagtccatctagcgattttaggatttccaggacctgccatttataaacttcctggaagaaaaattaaccccctcaaaatgggtgttgacatccagtttgcctttatagctcctctgatgccttttaaaaactatatttacccatcttatgtcaataaaaaggatgtatttattataagttgtggcagatagtgttttatagacaattttatagcccacgtgttaaaggtaaaagcaaagaaattatgctactttgctgtattttcccagtgatttatgtaagtatttattccctgtaggaaaaagttgaaacactattgttgacaacagggcccaaataggtatcagcttgatgtactttatcacatattatctttttgtttttgcatcatccctaggaggtaaatatgtaacactttggtttcattagcatcacaacagattattaggcaaatcaacagaatgaaattaaagttatattatctaattgaaaaaagccttcacttatattttcaagcattagttcttatccactttcaatcacctggggaactttaaaaaatctgatgcctgggccagacacccagaaaaatgacatcagactttctggggacaggacccaggtgactgtatttttctaaatgtctttcatgactccgctgctttagaggttcacagacttccacttaaagaactgctggttaagaaatgcatccctacttgctcggactcccagggatatcacttttcacctgttcctatcatttagaaaaaaatgatttgaatcagctagatacatgatagaggaccccccccccacacacacacacacaccaatctaagcacaaaattatcttgttgtcctcaatagtttgcatggataagtaatgcagaataagcatcatacccaatattaataaatacttaacaagaagcccaagattttaccttgtttcctattttttccttcagccatcacattcaaacctggcccaaaggtttctcacattctggcctccatcaccaccactactgctttggcctggccttttgtcaagctagaaattgccagaatttcctgacaacaggctctgtaagattcagtttagagcttacactttggctggagttcatcttcctaaaaagagactgtgatatgtaaatccacaacctgaaatctcattggctctccattgcctaccaataacccaaaatcctctactcaggaagtcctggatggtgtaactccattgcacacaggttcatcccacaaggcctcttggtaatggggtactttcatgtgcatactattctgctgctcttgtggaaagagtcttcaaccccattctgtataccctggacactcacctgagacccagctgaaacagaccttgtcatctcggaccctgcccttggttctgttgaaagaattagccaccagatccttgaggctgtctcaggacttttgcttcacctttattataacaattggaatgcaggcaaaatagtgtttccagttactaaaataaaactatagaccatacaatatgtttgttttgtgcttatttaactcgcaggggaaaatacccatatttttaagactctggatttaaaaaatctggttgattatatgagaatattgttggcttgtctgtttgattttgctttttttgggttgccaataaaattttagagcaagaaaatcaatctctggaaaatatgtctaaaatgcaagagaaaattccaagaaaataagctagatttcaattaacatgtgaaaagcatttcttaatatatacaatgtttattttacatggataatttatgtaagttattgaataaataatacttttaggtttgggttttaggggaggttttaggtttgggttgcagcagaggctttttcagctgattcaaatatctagttttcaaaatactctgcccacatgatttttagatatgacttagccttaattgctgactcagattttcaccttttaaaaagcaattgtgctttttcatatacactatcaaacaagattataagatattttaaggtaagaaagtaaaagggcatccactaatgatcatcagaatcacctggaagggccaataagccacacattaccaggccccttccccaaaatttctaattctgtagatctgtggtacagcctccaattttttgcttctaataagaccccaagtgacactaatgctgctagtctggagaccacactttgagaatcactgcattaaattaacaattttattggttgagttttcaccacagtgtgcatatctgttgactaacaatgaatagctttgttgtcgccaaacactgtaatgtttccaaatatccatatgtagtcacaggcccagagaaacaaaccacatctatattaagactgttttgttgttgtttgacccccccaccctttagtgttttaattacatcaatcctggagaaaaataactgttttctaatttgggcattacagatttgctaaggcaatagaaaattctatcttaaacctttagatttttagtcttctagtaaatataagcatatgagttccaagcaaattctgagttttaaaaaatttaataaaattgacaaatgttttcaataaaattggagaggcccatttccttgtacaaatattctaaaaatagatgataaaagttctaagtgccattttttgaaagatcagcaaaataattctacaagtatttgtgggcatgttatcttttctatgatactggttataaacttaagttatatgaagacagtgtgttagttaaattatgttctagtcctaccttaaggaaataaaaacaataaggctcttagggcctttcttctgcaccactgcagtacttgctaacatgttttaataacatgtagctgagaatgataaactctaggcagcagggtggcttggagatactaatggaaatgcccagtcaaaaagagcctggactagactgaggtctgaagactccaaataactttctgttatcccaccatcttctcagatggtccaatcatgctacactcagtctagggcaatgaccctgaggaatggtatgtttggcaaaaaagaaaccaaagaaggctactgccatgctttaagattttcccatatatctttttcagcatcttgaatggggtttctgaaagtctgaggagtgaactgtgaccaaaatggctgatattttgagctcaaagaaacttaaatttttaggtaaggatactaagaccgacttaaaaagtatagtatcaataatttacatttctttagctaagaattttcagaccacttcagtgcagatcacattgactgattctctaaaccactctatgaagtgggcaaagtgatggtctcatttttcaaatgaggactaaggtttatttaattcaagtgattaactcttcaaacatctagtagaggctagccagatgcattggctcacatctgtaatctcaacactttgggaggctgaggcaggcagatcccctgaggtcaggagttcaagaccagcctggccaacatggtgaaaacccatctctactaaaaatacagaaattagctgggcatggtggtggcaggtgcctgtaatcccagctactcaggaggctgaggcaggagaatggcttgaacccaggaggcagaggttacagtgtgctgagataacgccacggcactctagcctgggtgagagtgatattccatctcaaaaatcaaaacaaaaaaatctagtaagggtctatgtctagcgcctgcacttcaaatatgtgtttgtcatgacatcattagcccaatccaattttctttcattaattttctgaaataaatattttttgagtttatactatataccaggtgctgctgtaagtgctaggaatataacagtgaatcaaacaaataaaaatctgtgaccttttggagcttacattccaatgaatataggcaaaataatagcccctgcaaagagctccactgcctaatccctggactaaatgaacattacctcacatgcaaaaaaagattttgcagatttgattaggggcacagaccttgagatgtagtgtccgtattagcccagtgggcccaatctaatcacacaagtccttctaagcaaagacttttccctggttaggttagagagagatgtgataacagaaaaagggtcagacagatgcaactttgttggctttggaaatgaaagaagggggcctggagccaaggaatgtggacagctagaaagggcaaggaagcagattctcccttagcccactcagaaaggaatgcaaccctgaagacaccttgattttagcccattgaggcctgtgttggacttctgacctacagaactataaaatgatacattttaattgttaaatcactaagtttctgataatttgttacaccagcagcagaaaactacagaaaagatagacaatattcaagaaaaataagtaaaaaatatatgttggatagtgataagtgctaaggaaaaaagtcagggaatgacataggaagttatcagtagggatgcaattttgaatagggtagccctccaggttaacatttgcatagactcaaaggagatgaagggcaagaacatttcagatgaaggaaacaggaggctaaaagctgagactaggacaatgatcagcctgactagattctgaatatcaccattaaaagagcagtttctacttcagaatatatgtacaagcttcacctgggaaccatgtgtgatgatttaggatgaagtttcaaaactccacagatgacattcttatttttctataagcaaacagtcttgcccaaataacatcatttactttttcatgtttgctggagagttcattaagaaattcaatacaccgtattcaaagaagatgaattcttacaatcacttagaatttggtctaaggcaaacaattgaggatgttcagactgagtctttttggaccatctactcaacatcattatcaaccaacagcttataccccttcaaagggatctcaaattatatttgatcctgagttgttgctataataaatttagagctggagaaaaatagtcattgtaattattttgttattagagaccggcttacatatgctaaataaataaaaacaaaatgagagttaattctatgtgaaattcaccatcaattttgatgaaatttcctattgatacttccaagtacagtaggcctttcgtatccatgggttccacatctgtgtattcaatccaatttttttttttaataatatggttgtgtatatactgaacatgtacagacttttcttgtcattccctaaacagtacagcataataactattgacataacatttacattgtattaggtataagtaatctggagatgctttaaagtatattgatgtgtgtaggttatatacaaatactatgtcattttatataaggaacttgagcatccatggattttggtatctgcctgaagacctggaaccaatccccaaagatcctgagggaccactgtaatctaattgaggccaagtttcatgggtttgtatcctcttaagtacctgggggaaaaaactgtctgatttttttttaagttttagtataccatatattttaattttcaaagaaaggaaaacagaaattttatgatctgtgtcaatagaagtgttaatatataaagcaaagaaatgcctaggtgaatattggcctagtaataaacattctgcaatggtgcttcatgggaaatacgccttaccttgctactcaaaatgtgatccatgaaccagcagtatgaatatcacctggacttggtagaaattcttggaccccaccctgacctagtgggtaaccatctgcattgcagtaagatcccaggtgattcatatgtgttttcaatgtgagaagcacagcactggggccttacccggggccctccttaggaaacacaccaagtattgcatgttttttacatcctgacaggtccatatgaactcacatttttccgaatacagtgcactagcatatctatcatattttgaaaagctattttcatcaagggagcttagtatctggtgctcacgagatacctacagagaagtagacagtgttatgcttttgagaatttatcaaaccttttggtcatataatgtttttatttcaaaaccttaaattggtcaacatatttttaaatatttaatagttgagggatgaagaggatagaagtttaattagttcaaaggaaggtaaattgggaaggaaacaaacttttttgttgaatcagaattttcaggatgaaaaaagacaccagtgccctgtggttcagtgctaacacagctatgatgtgactcttcaaaggtcaatgcttgtgcccctattgctgcacatccttctccttgtcagtgttgatgtgtcattggctggctctgtgtcattggcttggtcttgctttcactgaactttggcctccgtgaaacttctaagtagcattgctcctacctgtgaatcttggaaacacacagggcaagtgaaattccattttcttcctttctttctttttttaatgattaatagacaatttatttaagcaagatccttatagtcatcrttgccagacttaatatgagatgttaaatgttccatccaattttccttcctggataagtttttctttcctatccctgtcagttttgaaaacataataccagaagaagaggggcccaattccacacagagctcccaagagtgagttttaggagtgagtctgaaattagaatagacatttgctgatcttgcataggtccaacgaattaaggcaagatcttcgatgagcccttggtggttagagttggttgttgtactgaagcaggtactcttgtttcagctgggctcttatggccaaccgttcagcttgcatctgccagccttccagagatatgtcatatttggctgagtcgagggtcaagggcagagtggccaggtgcgatggagtaaactttgggaatgacattttggtgacccagcacacaactgcctgaaattccattttcatgtgacacttttgtatctgtaaccatcaggtctgttccctatgttttctattccttaacttggctaccattataccatcacatctctttccttttctagtgactccccattagactagctcctatctcataacctccttttgtaatttaatggcccaaagattagcaaattccagaaattcctaaagtaatccaattagctcagaacatcatagagacttttttttttctttgcctcatcctggggttatttatcaatgaaagtgactttagattagatagacactggctgccacatcgtatcgttgtgacatcctgcacttaactaaaagggcttgacttaggcaccatctccttctctcttggcagctgctcagttagatgtttttgttttaaccaaagggcaggacttcaaatgtgaccctatttaactccatctggttatattttgaccttatgctctttttatatcctgattctgtcatccattctcttagctgtccttcccagcttgatgtaatagtattttcccaaactacacccttttccataataaagattgtcactcctccctcaagcttccttaagcaagctttatcatatgtctgataggatctctgtttctgattgtactcagtatagatttgtttcctggcacacatgtatgcactatgtcacttaatcacagtgcccctattagattacaaactcctgtcaccaagggttttgttccctcttttcaaagcagaacttaaaagaattttgcttacctttaagcgtgcagttcacatcattgactttaactggatggtggttgatggctgatggtcaactaacaaaaaaggagttgaggagttgaggtttcagatataacagaaggatacttaagacttttaaggaataaaaaactaatttttcttagcacaatggttcagatgaaagtaagggtgcatcagagaaggctgtcattggtttatttgttatattcctagctcatggtgattgtatgttagccaaatatcttgcatttgattttaaaacaaatcagaagtagatgactcagaaatgttgacaataaaattatggacaagccccttgctacagcagctcttattaattaaatatctgagacagcagaattaaaagagaagaaagtgatatacaatttggaaggtttggaaagctggccataaaattatttctttcagctggagataccttacctacttataatatataaaatttttgaagaaataagaataggtcttattttactttgcagtgaaggcttgaaatatttgaaagttcactttattgcaataggattaagtacatcaaacttcatccattcttatctctctcaaatattaggagtataactttcaactgaacttctttgcctgctgtaatatactgttctatagtgatattttaaaatgaatactttgtgaacatagtactagaaaaaggatagtgttttgaatattttaatagccttacagggttaaaaaaggatcttataaaaagtatgtttagtaccattcaatttttacaaatttatgcatttgcttattcatatatgtaaatttaaaatttacatataagcttatactcagaaaaagataaatgttgtaaacacacttgcatgcacacacacaccataacaaccaccatgccattcagtggttatttcagggtaagtaggattgcagaaacttttacatattcacgttttgcctatattttctgttataagcttttattttggcatgagaagaaaaaaattttaaaatttcccaaaaacattctttgtaatagtcaaaaattaaaatgaacagtgtctatcaataggagaatggctacaccaacaaaaaaagtcaagtaagaaataaaattggccaggcctggtggctcatgcctgtaatcccagcactttgggaggccaaggctggtggattgcttgagcccaggagtttgagaccagcctgggcaatatggcaaaacaccatatgtacaaaaaatacaaaaaaaatagccaagcatggtggcatgcacatgtagtcctagctactagggtggctgaggtgggaggattgcttgagcctgagaggcagaggttgctgtgagccgagatcacgccactgcattctagccagggagatagaacaagaccctgtctcaaaaaaataaaattaagcaatgggaaaagattcctcttgctattttaaatgttgatcaacattcaaattttcagtggttttaggtaacaagacatgtcaacctcctgaaacagtaattgttgtagataataagaatatatatgagtttggctttacctgattttaaaagtggagagaaaagctgaattgaagcaagcatacaattattttctaaacatatcctctccagtttcagtgttttttaatcaaaccaccaggaatggtgcagcagacaatgccagtccatgtctcccccttcatggtcccttagttgtcattaatgggtgactgcagagaaccataggcatttgaggacttaacagagatatgttttatattgagagtggacataagctcctcattgcctcattgtggtttgcacttcaaactgcagcgtgtactttttctaagctctgtggtctgccttcctaggactgcttgccctgtactgttatttcagaatgtttatctagtgaggagtgctgcattgctccattgtgcatcacagggcacaggaagcaatggtatgacatttttgctgcacatctatttttgattattctcaaaagatgaaaatgtttatcactgcaggggtgtattagtccattttcatgctgctataaagaactacttgagatatggtaatttataaaggaaacaggtttcattgactcacagttctgcatgactggaaaggcttcaggaaacttaaaatcatggtggaatgggaaacaaacacgttcttattcacatggcggcaggggagggaagtgcagaggaaagggggaaaaagccccttatagaactatcagatctcctgagaagtcactcactatcatgagaacagcagggggatctgctcccatgatctaatcacctcccatgaggttccctcccccaaaacatggggattacaatttggattacaattcgagatttgggtgaggacacagagccagaccatatcattccaccttttgccctccaaaatctcatctttctcacatttcaaaacacaattatgccttcccaagagtctcccaaagtcttgactcatttcagcgttaactcaatagtccaagtccaaagtctcgactgagacaaggcaagtcccttctgtctatgagcctgtaaaagcaaaagcaagttaattacttcctagatacagtggaggcacaggtattgggtaaatacactcattccaaatgggagaaattgtccagaacaaaggggcaacaggccccatgcaagtccaaaatccaatagggcagtcattaaacattaaagttccaaaatgatctcctttgactccatgtcttacatccagttcatgctgttgcaagagttgggtccccaccactttggcagctccacccctgtggtttttcagggtacagtcccctcctggctgctttcatgggctggcattgagtgtctgcagcttttccaggtgcgcagtgcaagctgttggtggagctaccattctggggtctggaggatggttgccctcttctcacagctccactatgcagtgccccagtgggaattctgtgtgggagcttgcaccccacattttcctactgcactgccccagcagaggttctccacgagggccccgtccctgcagcaggctcttgcctggacatccaggcatttccatacatcctctgaaatctaggtggaggttcccaaacctcagttcttgacttctgtgcacctgcaggcccaacaccacgtgtaagctgctaagccttgaggcttggaccttctgaagcaatggcctgagctgtatgttggccccttttagccatggttgggactgaagcagctgggatgcagggttgcacagagcagggggaccctaggcccaccccacaaaataaagtctttcctcctaggcctccaggcctgtaataggaggggctgctgtgaagtcgtctaacaggctctagagacattttcctcattgtcttggtgattaacatttggcatctcattacttatgcaaatttctgcagctggctggaattttcccccagaaaatgggtttttctttgctattacatcatcaggctgcaaatttctcaaacttttatggtgtgcttccttttgaattttcttccaccagatactctaaatcatctctctaattcacagttccacagatctctacggcagggacaaaatgccaccagcctctttgctaaagcatagcaagagtgacctttactccagtttctaacaagttcctcatctccatctcagaccaactcagcctggacgtcattgttcgtatcactataagcattttggtcaaagccattcaacaagtttctcagacgtcccaaactttcccacatctttctgtcttctgagccctccaagtctctaggaagttgcacattttcccacattttcctgtcttcttctgaggcctccaaactgttccaacctctgcctgttacccagttccaaagtcgcttccacattttcaggtatctgcagtagtgccacactactctcagtaccaactgactgtactaatctgttctcacactgctataaagaactgcctgagactgggtaatttgtaaaggaaacgggtttaattgacttacagttccacatgactggggaggcttcaggaaacttacaaacatggtggaaggggaagcaaacatgttcttcttcacatggcagcaggagagagaagtgcagagtggaggggaaaaagccccttataaaaccattagagctccagagaagtcactcactattattagaacagcatgggggaatctgttccatgatctaatcacctcccatgaggactttcccccaaaacgtggggattacaatttgcattacaattcaagttgagatttggttgaggacacagaaccagaccatatcaaagagtttgctttgacaaaaggaagtgtatctttttatttacttatttacaaagcagcttattaaagttattaaatagttttcaaaggggcagcttttttttctactttctgtattagtaagcaaccatctatgattgtaatacaactgaggtctcccaagagagaatgtagcacaaaacaaggtgtgctatctaaacctgtaagaaatgttgtgcagtgaaccaactccagcacagatatggagctctctcagaaacaacataggaaatttagatatgtgaaattcaaatagaaatagaaaactcaatttagagtttagtttgcgtaatatcttagaaatgttttcatggttcaaagctgatatttgacaattgtgttagatctataaaaattcacaaaacatccctataattttcagatacaaaatgctaataaggattttaaagttcaatgtggaccacagggcttctgcttttgcaggtgtaccttcatttacatcctttcagttgaggaagggtgggtgtttgagagcaaaatgtatgtataaggtaagaagaaaagagaaatgagagagagaagcagaagatagtgagccatcaataatgatattagttggcattcatttcaaaagccaaccaccccaatttagaggatttgcatttaggactaattaaattataagctaattgagcagggactgagttaagcctactgatagtgcttcataaatattcatattaacaataatacaagatgttccttttcaaggctaaaaactttttctaaatggtgtatacaacttgtgagtcttggtaagtcaatgttgttgcattcctgaatttttctatcccttttaaggataattctaactcaagtgaaccgaaattttccctgtagcagtagaggtcctctgaaaattgaggaagctctccatgtgtaatgctctgaaaatggcagacatttcagagtcacattctgtatatcattcatgtgaaatggcataggcaattttactcctcaagattctttgcccagaattcgcaatttaataagaacaagtattatgaattgttgaagattcttccagctctcttggaaataaagggtcttctcaaattgtagctttggtacattaatagttactctgggggcctaaatgagttagttaatgtgcagcttaaacatctgaggcacacccagaagtaactcaggactgaggaattcaccttcccttgctactcaattgccgtttgtgtaaaatagtggacagtgacactgtttgtgtgcagctagcaactgtctctaagtcttgggtttgttggagcataaagtgcactccagtgccctgagtatacctgtaagggtatttaccatgattcataagacttgttttaaaattcctctccaaataaacaccctcttaaatttaattttcctcatatttctatgtggttatttatagttcaagaacaagtatttaaaatatttaaatgatagccattcaattaactattccaaattttagtttttttcaccaaggagctgagctgattatcaaatatgctttatgtgaactctgttttgtttaaagtgtactgtattttttaaatttgtgaacatgggaaattatacaatgttctataataatttcaaacctgagttttttttaaatctcaatgaaagctgtaccttatctgaaatgtaaattagtgtaaaaaccctttcattctcaataattgtcggctactatctttttatcttcatgttcatcaatagtaaacattcaaccttcaacggttaacaaatattaagtgtttaccatgtaccagacacttttctacattctggggtgacagatctagaattacaagtgtatcaaatattataacagacaggtggaaggtgctacaggatcaaataagaagaggacataaacttaactgtagagatgggttggggagggaggaagaagttagtgttagaacaggcaacttttaaagaattaaccaggaagttatgcaatttggggtaaagtggggaaagagtgtcagggaaatgaggttgaaacagataatataagatttgctatttattcaaaaatagtttagaggccagtaattggctgggagaagaatggtgcacagatgggcaagtgttgacctgcaaggccaattagaaagctgtgtctataagtaaaggcaagagatgaggatgacctggattaggaaacaaaaaaatcctctcttttacctgcaaaaatagctgttgactttgtctcccttccatacaagacttggggtctccacgtttccagcaagagactgggcagttatacatctgtttttatttttactctgacctgactgctttatgcaagatgggccaagtctcccttatacatcaggaatgcactgatgtaaagacaagatatctgctcctccagccacctttcttccaggtctatctgccttaattcctcttcccccattctcagtggtgcatcattctctactgctgtcctagtcctgcctcagttttccattagttttattttgcagcagagattttttttttttttagtgatctcctattgttccttaatcacccttgaaatatacctaattaacccaagtaaaccttcatgatgcatgtctcttcatcctaggagtataaatgatccttgtatatctataggaacgtttctattccagtctttgaaattgaggaatttcatatacattatatatatatacacacatacagacacacacacacaacgtgtatatatgtgtatatatgtgtatatatgtatatgtgtgtgtgtatgtgtgcatatacatattccattagttatgaacagctcttttttatctcttaaaagcagcaaaataaaatattgacattattcagtgaattgatagttgaaatgtaaggatttcagaatgaaagttatgtagtaaatcctagccctttccgaatcctgatttcctaaatctaacctatatggaatttcttttttttttaataaaggttccatgaaacttggcctctttcctatcatcttaaatcgttctcctcttatacttctcttagttctacttctttcacgtgaaatccattctaatgtgaacctcggtttctctgagaggtgcctcaccacaatgcccatgcctttctgcacttcccacgtagatcttcttgccccaaatacctactgtgagccttctttcctctgtgcctttcattattccactcatctgaaattcagtcgcaccaactttttaagcacctttatcaggcactgtggtcagtaaggtttacagatgaataaggcatgattgccagtcactgacaacaaatttggggcagggagaacagccccatccccataaatggtctcatgtttcttttgtttgtttgtttgttttgatagaatctcactctgttgcccaggctggagtgcagtggtgtgatcttggctcaccataacctctgcctcccaggttcaagcaattctcctgccttagccttcgaagtagctgggactacaggtgctggccaccacacccagctaatttttttgtattatgagtagagatgaggtttaccatgttggccaggctggtctcaaactcctgacctcaagtgatccccccacctcagcctccaaaaaagctgggattacaggtgtgaggtaccgtgtcctgcccataaacagcctcatttataaaccataaatacataagtgctgagatagagatttgtgtgtgtgtgtgtgtatttggggggtggtggatacactttgcccaacaaatccaatattgtttactacttcctgtgcttcccacatgactgttctctcatctttctcttaaattaatggaaataccctcctaaccagttttccgactggtgcttttgcccatccagtctaatctcatagcagagttattctacaaaaacagtaattagttcacatcgtgttgctctctgctcaaagccatccaatggcatgccatctagagtcaaagtcaaattcttgctatgtctgttaaacttctacatgatctatgtctaccgcccctttcaagtgacctggatctgacatcttctcaaaccactgtccgcctcacccactcacttctccactctgacttcactggtgttccctgaatgtgccaagcatgttctgcatcacagcctttgcactacctgttcccagtgctgggaattctcttcctctaagtatctggatggctggttccatcctgcccttcagatcatcgctcatatgttactttagcagtaatcctttcctattcatgctttttcttccaccttgacgttccctgctgtatttttattcatagcacctatgacctactgtatcctttgttatctgtttattgactgctttcatccaacaagaatgtaagctctataagggcaagggcttttttctgttttttcactgttgtatcctctgtgcctagaatggtacctgtcacataataggtgctcaatgaatatttgctaaaggatggaaggaagaagggaagaggaggaaggagggagagagagaaagaggaaagttgaaagaagaaaggaagggaagaaagatggtagggaagaaggaaggacagcagaaagtctcatgttggctttactaagtctctaacacttattaacacctgctttgtcttataaacagagataacaccggcctgtagcctagtgcctttcgaaggcaacattatctggatagaaactaataaggttgttctgtttatgctgcatttatggcaagagttactgactttccatttatagttgtgatataaagtttcttctttaaatgaagacattttatttcagtttttaaaaaactagtctattacagaatttttaaaattaataatagtatataggggatgcagaaacaacaaaaatcatgatgtagaaatgtggatatggcagaatcatgaagctggtagtcgaatgcctgaattggggataagtgaccccttcagccatgaaacattccctgactattgccatcttcccctctttcattcctgttgtttattcgactcctgtacactatcatgggttgaactgaaaccatttggtattgctcactgttgttttgggtgttttagttctatcttcctaaattgatataagatccttgatgtgagtgctcatgtcctgcccccctcctcctgggcagccaccatagtgcacagcccagcactgacaaaacagaacattaaggatgtttgcttgttgtattcatcatgactcagctacacaataagacatgaggttaaatagtgtgcagacagtaaaaatactcgagcgtgctttatttttttttttagcaaaagaaatacaatagcaaacatcattttgccttgcaaactggcaaaatgaaatcactatttttgccactggtgtaaattttatacacacacacacacacacacacacacacaaacacacaagtacatacatatatacttattcaatctggtaggataaattaatcactaggacaaaaccatgagttaataggagccaaattccagcacatccaattggaatgcttgagaattaaacctgctaaaaatactgactggaataggaagacattcataaaacgattaggcacattttagtggaagtcagcaacaacaaataattaattgatttaactaataaatttagatatttaaattgtcaaggaattctttgttcttctgttttataaatggtattagcattatcttttttactggaaactttaaaggtgtaaaatactgtcaagagcaaaagcaacttagattgcctgtaatgaccattacattgacaccattttttgcagtatgatttgctattaaatgtgaataacgtgaagaacaataacactcctagatcacctgctatgaaccaggcactgctctaaatagctcaggtattttaactcatgtaactgctacaaccctatgaaatatatcctcctttcagcttcattttactagtgaggaaaccaaagctcaatgaggctctgttaagttaccccaggtcacacagctagtaagtgtctgagctgggtgttagtgcacagtgatctagcacccaagtccatatacttaaacactacctttgaatgctgctctgtaccctatataaggaagctgtggcccaaataggcaaacctgtgacaaacgaatcctagagtctaaaacaaaggttgaaaggtgactgtaaaagtaggcatttgatctttaaaaaccaggtgaatttgacctgccattcttgacggcattagtaaacattacatttcttataatttacattaaaaatctaatacttcgtttacaaaaaaagactttcaaagaatatgcatgcattttatgcaaggttaaagaagttttcagtgctggctagtgaaatgggggttagatgccctgtctatactacatgtttaatcaatgtaatcttaaaatgagatgaccttgtagccaagcattttttctttcctttataagcaatattaactatattaaatcaagaaagctaatagtttttcgtatttctcaataaccattaagttcaaacattggaagagtttaatattttacatgaaaaatccacaggcaataattttaagtgacttagaaaatatttaccgtattttaaccttaaatgactgtgtatgtgtgtgtgtgtgcctatgtgtgtgcctatgtatgtgtatgtatgtttataatctagtagttctcaaggagtattggagaaagaatatgtgatcacatgtagtttataaaagctctcgtgttttttgaaagacaaattttttgtcaatctagtggtaacatgatactaattttttaattaattttaatttccctgataatacatttaagccttaaaaatattgttagtgattcatgtttctttttctataaaaattatttctaagccttcctcaaatttcttccagactcttttttctgattgatttttaagaattttaaaaatattctgcaatttctcttgatcacaacaagtgttggaaatatcttctcccgaagaaaagaatgattcttaaaaaaatactttagtagcagtttttttctatgaaaaaattagaagtagctttttcttggcagcgttttcttctagagcaatagggaggaaaacagaaagctgtagactgttatcttcgtccatacatatgttagtgctggaactcaactccaaaaactttgttcctttgaaaatcatatccctccagaattggtggagtggtgatggtgtggtgttgaaggcctattgccaggactgagaaggaaaagctaaagaaagagggaaaaaaaatccagagaaagtgactgcctggggaggagggataggcaagagaccaaacatcgattctaaagggaatcttgcaaatgctctggcaagtctatgtatgggaacatcatttgcctagaagatgctcccctttactccctttttccctattgggctggtttagaggtcaataaacttaattattttacatctagtaatgtcccagatgatataaaatgtcattgttttcattctatcatatagttcatgaatcacagttaaaataatgtttcccttctaaaaatttttcaagttttttatttcaccgtaaagttcttttacatatggaattgaattctgtgtgcagtgtgagaagaaatccacttttgtatgtttcccatatggctaactagttatttccacaccatcgattgactgatccatcatttttccactgactggtagtgttacctttgacacgcatcagtacagttggtctgctttacctttctagctataattgtggcgtatccctctattaattgcctcctttagtgttattcagtgcattttatacattttgttacgaagatcttatacattttttattcacatccactgtagacttctgttgctattacaaaatggcaacaattttcagttatattttccaaatgcttgctgcagctatatccaaatctaataatttttatatcgaacaaatatttagaaacttttcaaactttgatgtacttttaatgatgtttcttctgattcttttaggtattctttgtagacaatcgtatcatctgtgaataacaaaaatttgtttcttccattccaatttttatactctatattttataccactttttaaaatgatttattgactggctgcacggatgcttctctgactttaaaatatgaatccctgagggatccttttaaaaggaagatcttggttcagtggtaggtcaggcactgagaacctgcatttctaacaagctcccaggtgacagtgaggacacttgtccaaaaaaagcaatgctttcaaaagactgttaaatagaaatggagagaacaagcattctttacttgtgtctacaattaaagagcatgcttccacatttcaccatcaagattagatatctttgattagttttggtaacttcctcctattccaaatttgccatacatttttatcgtgaatggttgtttagttgaataattttctgtggtttttcccctttaatctcttaacattgtgaattattagaacatctcatgtttaaagcctttcatgccatatgcacacaaatatacatacacatataggtacatagaaaaatatgtatttattgctgctttatttgctaacatttggtttagactttttaacctgtctttatgattcagattggcttcatgtaatccttgaggattcttaatgtttttaagtttcattatagaatgaattaggtgtataccctcttattctaagctctttacatggaactcacttttatactagtttttgagacacactctgttataatcagcatcttactgatgaagaaacagaggtacatggaggttaaataactagcccaaagtcacatagctagtaagtgataaaattcgttggtttttgtctgttgaacaatgaagagaatggtttcctaaaatttgttttgtttagtcactgattcactagttcaatcttaaatgtaattcagtagttcagtcctagaaacagttttcaaagccactaaaaacagatttagatcctagtgaggtaaaaataaataaataaataaaatgattttgaggccactgagaaaagtggggcccctagtaatttgtaacagcctcccactccctatcaagaggaggtggtagaccgagattctaaattgaaaaatgaaggccgggtgcggtggctcacgcctgtaatcccagtgctttgggaggccgaggcgggtggatcacaaaatcaggagatcgagaccatcctggctaacacggtgaaaccctgtctctactaaaaatacgaaaaattagctgggcgtggtggcgggcgcctgtagtcccagctactcgggaggctgaggcaggagaatggtgtgaacccgggaggcggagcatgcagtgagccgagatcgcaccactgcactccagcctgagcgacagagcaagactctgtctcaaaaaaaaaaaaaaagaaaaatgtaaacacttaccttggctttgtcacttaatggcctatgtcaaaagcttaatttgcttcatgatttcatttaaagtgtatacctttcactgaattctgcagtgatttagcataattcactaataggtatatgcctatcattttcataacctttcaggaaatcatttggccctagtatactgactttcgctctaagttttcctttatacctgaatctcaatctctcttactgagatttaaacctgtatctttacagcgaacttcagaaacatgggaaagactgtcattatccttcatgaaatcctgtggtccacaatgaagcgtgtttattttgttaccactcagtttgatttctttcacattgtttcatggtttttcttaaattcttacttactctttagcatgtggaagtactgcctttcaatgtaagacattttactttaacaattcaaagagatttttttttctatgctacgtagatattagggtacagaagaaaatacaggagacattagcctgctcatgaaggttatgaactgcacaaatcatgtagtcttttacaggtttaattgcctcatttgtgaaaggaggttgaactaggcagtctctcacctctctgtcagctctgatgttaaaggattttgttcatccttacaatgttttctcattaaagctcaaatatgcataattaatgtaatgcattattttttaggagattgaaaacctatcatctagatgatgtgctaacctgatttttgtcaatatcattcttgattctgtttttatatctcaatatgatacagagttgcaaaatatttctaagctttgatcattcttttgggcatattcctgtagataattttgaaatgatatatttagtggagaaaatgtaaaaataatattaaatccttctaagaaaaaacaaatgtattaataattaaatagctgcactgtaaaccaatattcactattcaatcattgattaccaaaaagatagcggcatgaaaaacctctatatttttatctcatggtttaagatgaatattttgcccttcatatttatcattttttaaaaaagaacacatttagactttgaaaacgatatgtaatgtgcttctacattaatgggaaaaacaacctaaactgtatagtcaaataaaatattggaatcttataccttgacatatttttttaaactagacatcatctaatttcttttcaaaaatagaaataactttttatctttgtccttggtattactttatacttgtctgttcagtggcattgctattctgtgataagattttattacagaaaatgtctctatctgtacttgaacattagtctaattttttttacaaatgttccttgatttgacatctgtcaactgatttctgagttaatattatcttttcagtttccattcctttgaaataggaaatccaatattaaacccttcaataaagatgaaccctacatctgtatatccagaattttggtttgataaaaccaaaactgataagttcaatggggttaaacattcttgaagtaaaattggagagacatttgaacacctttaccccaagttcattcatctattcatcttctctttaattaagtctgtttgaaaaaagctttcattgattgttagcttcctggaatatgtcctaaatatcataaggcatatggagctccatgactcctcagaaaagagcacgttgattgatcagtgattctgcattagacatgcgtgctacaagtttgatttgactgacccagagaggaatataaccttaatggaaacagagaaaatatcttcatgtcacttggcttagcctgctcctttcaggggataagttgccacagcattcaaaagggtgtagtctatgaatatttttagaatctctaaagatgaggattttacaacatggtattcaacagcagagtttaatttttcttttttctcacttaacactgagtcattaacagttgagacattttacatgactgtgagcagttgagcacaaaaaccagatgttaagattgggtacagtcaaaagtttagacatccacacctgtgttatgttttgtttatgttctggagcgccaaactttgttacatctttgaacccacttcagacctcaaattaccacattttttaaaagcctcattagaatggtatcatatagtgctgaatccatagaacagaaattcagtgttttcagattgctaatcatgtatgaaagtttctgaaatcatattgtccaacgggctgtaacttggcctattcttctatctcctaaggaaattgaattgactggacactgttcattataaagatacagcaggtacttccttgtaacctgtgctcttctatatattttgaaaattattattcattttcatatttatcaaagtgaaaaaagcaacatagctactctacttatatagctcattttaaggaattttatacttgttttctagttttgtgaatttcttatgaattcacaaaaataatgtaaaagctaatggtctgtccctgctaccattgtgcatattagtcaacaagtacaagtagaatatttaaaagatttattagttcctaattatatatagaaaaagactttgaaaattacttaagccatgattctaccaagatgtaaccacttttattttcttttttccttcccaatgttgactggttatatgcatattaatggagctataataataattgtatactttttatcttactttctaaaccacattattattccttaaatattgctctttcttctgacacagtcttctcatgtatcattttgattactacataatattctgacttaatcgaaactttttgtattttttgatgttcaagcttcttttctcatttgttactattagaaatgatggctctagaaacatccttagaagttttccttatcttttaaattaaactgcttttattttactaaaataatctttaagaactgggattactaggtcaaattctacaatcatatttgtgtcccctgtcattttgtaaccaaaaagatgctatttgagtaagacctgcttgataacttacttattaatcttattttattttgtcttgcatcacaaatgagtcaaattctatttttctctaattaaatcttacgatcaccggtacttggatttaagttttacagtgaaacagaaagaattttaaaaaacggtttaagtaggagaaattatattttcagatctccttgcctatctgctggaatcactagtgccaccacttttcactggtgctccttttgcttcacttaactaaagagttttcactcagacccttatgatttctccaagatgcattacattttcctgctgtttccatatacctgggaaatagttctttcatttacatcttctgtctctatatttttccaggtaagtcatgcctcctttaaatttttactattttttatctatgtctgtctatctctactaagatgttctctacctttgtttctgtctacctaactagctagctacctacctacctatctggaactctacctctgtctcttatactatgcccattcttctcttttctctttaaaatttttttgttgctgttttctcttttcctctatttctgtatctcgtttgtgtcaaattgccagactacttaattagtatattcatgtttgtttttgaatttctattactgtattttctcttattagtatttgtttttataattattattttcctttacttttttgtgtttattttcctattttttctaagtaagttgctttgtgcattgagttttagcctttatttctaatacagtgatttaattctattgctttagtgacaatcccatatatttgatgcataatatatttattattaagttttaagtattttataaatccctttgatttcttctctcactcaagtgttatttagaagtactttttaaatgttttccaaaggaatgagtttttaaataaatacattgttattaatttctaattttgttcatctttaacagaagagatatttgtatagtacctattctttgacattgttgaaactaaactgaaaatattagttaattcatgaacactggattaattataattataatattcaaaaaatataattatattcaaaagtataattatatataagtttatataatttataaagtttataatataaacctatattttatatatttataacttaatataaaattataaagtttataatataattataatattcaaaaatattaatttaggcttcctatttatcctgctttctaatgtttgttttcttttcacgtcttttctggcattattttagatcaaagtgatttcctcccttttctcattgtatttttccttctagtttgtaagttttaaactctaattctattattttaataataaccctaaaaaattttccaaatatgtaacttaaggctgaagttaaataatatctttacccttttactgtcctcctgagaaaatacaaaagaatagatttttgttctcttcatatttgtattacattgtagacattatcattattattatagttgtagtaagtcatctttggtgaacattttctaacacattttccattttctttgctcagcattttttttttttttgcatctgagaccatcctttttatttaaaaatgtcttttagaagtttctctagtgactctccaatagtagggaattctcttcatgtgtggttttcttactatcttattttgtgcttagacttggaaggtagttttgttgtgtatgcattactgggttgacaactacttctcttcacctctttaaatacgatactaccttgtcttttgagaaatcacttttcagtctgaccagtgttacttttttctttttgggtgctttgaaattcttatttttatctttgttgttgtgcaatttcactctaatgaatccagaagttgagtttttcaaaagtttacttaaaatgtattggtattcctaaatatgagtgttggtgtcttttatttattttggaaaattcttagctattattgtttcaaatattgcctcgttgccattccttttaatctatcccaaccctagtaagacttatgttggccccactctgtcattcacctatcttaaccttgctttcatattttccacttctttttctactgcattctgaatgtttcattcatatatgttttctggctcactaattcaaccttcagtagagtctaatttgttgtttcacctgtttgttgagtttctaatttcagttattagacattcaattttagaagttctattggtctttattctaaatatgtgtgttgatttttattggtcttttgctcatttactaaattttttatcatttctttaaacagcttaaatatttttttttattttagttccttgatagttccaatatctgtaatcttgttggtctacctgtgcagtttattccactgattgtctctcaggcaagtttattttttttatgcattttctatatttttttacatatgtgagctcatactctttagtattttatctctggaaattatctgtgttgaaagtgtatttttcgaaagaggatttgcttataatttaagtaactgcatgtctgctaactatagatttactttaaatgaaatgttcaacttttgggccacgcaaatatccaatgccatattacatatcgcaagtatacacttgtgattagaaatttttgaaagaaatatttgttttaaatatgctgcctgaaaccaagacaagtcttgttctgcatgaaagattgtagcatgcctagttataggtattgacttttgggtataagactttctgtgaagtctgaatgtgagttctttctctgtttaggccccttgtttagattcttgccctggaacccaaagaattggtaaatgccttcaggaaaaaaacaaaaaaacaaacaaagcaaaaaacaattctagtacttagttatccctgtgggaccaagctttcttaatttcaagcctcaaaaacttttaatttaatgatttaaagcaatcatccagtataattttagagcaaattttgttgaattataccataagaggaaaaagcacacaaacctaaatgtaaaatgtggtaaatttccatgaagataacatacccatgtaagcagcaattagattaataggcagtatattgctaagctgtagaagcccccatttgtgtacctttcagattctgcccccaccccagagtaactactattgtgatttctaagataatattcatattatttaccaaagagagtgtgttctttgttctctagcttcttttcctcaacactgtatttggaaaagttatctttcttttttcttttcttttctttttttttttttttttttgagacagggtattgctctgtcacccaggctgtagtacagtaccatagtcataactcattgcagcctcaaactcctgggctcaagcagtcctcctgcctcagcctcccaagtagctaggactacagacatatgacaccacacctggctaattttattttatttttttgtatagactgggtctcgctttgttgcccaggctagactcaaactcctgggcctaaaggaacatttgtctttatatatgtagttgtagttcattttcatcttcatacaaatatgttataaattatttattcattttattgttttgttttgttttgttttgttttgtttgagaaagagttccactgctttgcccaggctggagtgcagtggcacgaactcgtctcactgcagcctctgcctccagggttcaagcaattctcctgcctcagcctcctaagtagttgggtctacaggcacctgccactacacacggctaatttttgtatttttagtagagatggggttttgccattttggccgggctggtcacgaactcctcatctcaaatgatccacctgcctcagtctgccaaagtgctgggattacaggtgtgagccactgtgcctggcccattttattattggtaaatatttgttttatttttatttgaaactattacaaatcatgctgctatgaacattactgtatacatctttttgtataatgcatatatatttctgatgggtatatagccagaagtggaattgcttgattatgaggcatgcattttttgaagactgacagacagttttctcaagtagcttcttcaatttagattccaaccaatattctctattttctaagagctccacattcttgtcaacacttcgtattatctttttcattttaaccattctagttgagtaatatgtagtgttatttcattgtaattttaattttcacttcactgatgtctagtgattctgtgcattaatttttttttctggacttttgaagtgttctgtatgggaaactattcctccatttagctagctattttgctggaaattattgtataaaatatcatctcataatttaacagtatattccttcttctcttcaaatttttattaaaataatttttcagtactcttgaagtcaacttttaatttgtccaacctgtctttgagctccccctgctgttttctatttaaactatatacctgttgattatgcataattttctttaaaatgatggattcttagccaataagctattttaagcagaagcattttttttgccaaagactaagggtataaaataaatttaaatgctaactcaggatataagaattattaaaattaatgcttgaaaactagtatgttacatatgggaaatctgtataccttcataatttcactgtgaatctcactcctctaaaaaatgaagtcttgaaaagttagtattttaaaatacttaccttacttgtaatgtgaaaccatttatattaatttagcaaatcaatgtttcaaattattaacaactagacaaactactgagccatatgttaggtatattgtaagcatgttgaagtcaacaacatgacttctacactttctactttctcacggttcccagaatatctattttgacataattattgaaaaaaaattaaaagcatttattccattgtcttgctacatctaaattcatggtgttatgtttctttagggcaatggagctgaaatgaataatggataccatgtagtgtttttatatatttcatctatgagctatgacagatatctccctacattccagcagaaaaaaaaatgtgcttctttcctaagcttgccagctataaaggcctattagacattcagagattatcaggaagcaaaaagcttcatagtcttaacaacgtaaatctgaagtcttagaatgagttcattagaatatagacattgaatatgaggtaagtctgagttgaaattctatctctgacaactgctggatctgtttttggtttccaatagtaaaatggcactaataatgatatatgcaaaatgtaaaatgcttagcacagtgcttggcacatagtagattctaagctgtagtttaaacagctattgtgctatgaataagccatacgttgacattttccctcttgagaatgtgctatttaagtgtagaaaacctgctttcccctgtccgtgtgaatttccttaacattcatcttggaaatgataccacatacccttatattgatgcactgcaagaggccaatctaatgtaggcataaaaagagtaatctggtaatctgctcttctcagcaccctctgctaataatgctgtttgaacaaattctagaaagactgttgatgccagagccaactcagaattaggcaggtgaatgttttcaacttctgctaataataacatcagttctgtactctcctctgggttctttttgctgtattaaagctgcagttcccttaggttagcttctatgcataacctgggaatgcatattttagctttttacttccctcccaaagaaaggagcagaagaggagaaccaaatagccaagatctagaagatgaaactgttgtatccattgtgtggattcagataagcctccacccaaaatatggttcaaatgttaagactaatgagcagccctacacttctctctctctcactttcacacacacacatacacaaacacacgcgcacgcacacacacacacacacacacacacacacacacacacatatacccctaccaagaaagtatgaaagtatgtattacttataaaattatgaggtttttctggggagagcagagcaggcctcccaagaaggtctgaagtagcttgagagagcagggggaaaatgactggtttgagattttatgacttttagtgggtgaggccatgctgagagttttgtgtgggtggactctggtgtggtttgaatttcccaccatcaccaaaggagagaacacatgggctttcttaacagttttcccaaatgtaggacagaggggaagagagaggtataacactttaaagctatcagcaatgacacatcaaaaaatggacatagattttttattacagaaattaaattgtatgagaacagaaatgaatcccggtgctacacagctgatgtttcctaggaatgagaactagggtaacttttttaaagcacgtgtttatattgattggtacatactagttagccaaatttaactgggttgagatggtggactttccttttgaacctcagttatgcaaattgtaagaattgtgtttccttcaaattactcaaaataatattgaatttcttacaaatgcaaaatgaattgtggcttaatgtgcatatgtatataacagatactttgttcaactatattatgaaatactatagtatgtaactttcttaaataaacaggatgacaaatcagtgttaggattcaaatgggccctatattactctgtatctctcataggccaagtgttaattctggtacacatgacatttagcacatgctattacatttattgattgcatatttttatctgttatcttttggttcattctacaaggattcttcaaaagaaatcaagtaatcctagaccccaatatataaaagaaaccaactcatcctagacccaatatataaaagtaaatgacattttgttcttgtcttaataagttcacagtatttcaggaaacatgggaatacagaataacagataagaaatattataagacttctagtagagaaatatgcttaaaatcatatgtatgttcctttacacctaagaacctttagatataaatgcattttaactgttctggagagttccaactccaaaatagcctttgttcatatcaagaaagtaaaccaccttctatttcaggtgggcttactcaccatacctggggccacattactgtcccagctcactgaaaggtcataatccaggatgaaaccaaacttgaaaattatagtgaaacacagtagaataatttagaagcatatactttgatgtttttagaaagtaaggaaataaaactttaattgaacttggaataaactcagttctgagcattccattctactctgcagttgtcatttatagacagctgtggatcataatacctatagactagatatcgttatctacttatttatattaatgacaggatatccctgggcaaacagcatcaccactgtactgtgtattcttggttgtcatgggaacctttgctgtgaaccagcagtgagagcacttccattgaataaagctgcctctggatagccatgagttgcatgaagttattttactaattttatttgccttttacttgaaagcataagtttctgaggatgtaattacagtttcccctatatttctacagaagtagttatagatgatggacctcctgaacttttatcactttgccatactctgtaaaattacctaagagctccagagcatgaaattaacactcaggaatattgtagcctaaccttttttgctactctgaataatactgaattgaagggtcttccacagcaagccctctttaaattatgctttctgatgctttacctaaggctatacacttgtctttagattcttctagattattttctcctaatacagaacttagcatttaaatgacaattttaaaaattgagatcaactcttcaaaagaaatcaagtaaaagcaatttcagcaaaaaaaaaaaaaaagccttctaatctcctacaaaacacctctatcctatcaagatattgtgattgagaattagaaatagtgtggaatcagatgttagtttgtcctttccttttcactggaatttctccatgctttaatttttatatcaagaaaaacaattcttgcaatattccctaaggagagttttacaaaaaaagagataaaacaaactacacacacacacacacacacacacacacacacacacacacactaccttaaggaataaagaaattatctgagtggaaaataatggtgctttcaattttcctaattgaattaaaataattatctaagtctttttgatcttgtcccaaagtgaataaaatgtctttttttaaatttatgtttcattagatatatctccatcttttcagtattcaccccaagttttaattgggtagaagaatatggaagaaattcctattgctcagacaccatgtttaaagctttctgaatgtgatctaatacctccattggttggaggtaattaaacagagatctgttcttttaaacaactatttgagtgctttaaatctgaaagtcatgtcataaatgtcagacctctttctctttgctttaatcatctcagaaagacttatctgttaatggaacatctgcatataggtattttgttgaccacaggtgttccacataagtttaatctacctattagttatatgttcatgctattgaggacctttcaataataaactttactgagtgcttactctcttctaagagtaatgcactatgctaggagacaggagggatataaaggtaaagaaaccatggcatgaatctttagggagattataatttagtggagaacactagtgaaaggaggcaaaggaattaatagaacaagacagtttctctgagtctccaaaggcactgtaaaaattcctggggaaactgcaagcaagagcaaaatgttagctatcataaacattctcatgcatcttcaggttttatcttcatccataaatttacccattaaatttagacattctactatctattccacttgacattccaattagcagctcagcctcagcctatcaatatgaatgcacatcgcttccctgttctcttgctgtgccagtctttccccagtgtagttaggtagtgtctccaatcagtcaccatcaccatactgtgctgattttatattctgaatattttttaagctttttcctttttatcaattgactacactagtttagatcttcatcatattattgtacacaactgctgggttttttctgtctggaaagtctattttcctctttcctccccagctgcctctttcttctgcctctggatgcatttcctcattttcctgccttccaagatgtatttaatacattcctctgtgctctcatatgctgatacatgtctgtcgctgtatttgctgtgtaatatccaaattatttgtgcatgtctttgtttttctccaaaagttgcaagctccttaaggtcaggagctgttctttaatatatctactctacctagtgtagtcatgcttaatatttgttgaagtaaacaaatctgaaccccaaatgtattatgtaatctccatatcccagcacagataaaggatatgctcttgaattgttttattgggagaaaacagctgacagattaggctacacaacaactaaaaactaagaaatgactacatgataaattgtaatgaaaatcggaaggcagactgactgaggaatatatctctaacaagtattcaaagatataattttgttattgttaaaaagaatacaatgaatggagagagggtttggatttcacattcaggacttctgaagaccaagtataagagattcaaaagtgataatgtgaatctgattagaaaattcaattttggaatttaaataagaaaaaaattagttggtctagcaggtgaggctataatatggaaaaatgagaaagggatacagcactgaaagtgaaaatgtggaaagagagaagatcagaaggggagaaaaaaagaagaaataaagggttagagtttatgaactgtaccaaaagaaatgatacaatggccagtcctgtgagggtagtagagggatctctttattgtattttcttattttatttttattttagattcagggagtacacgtgcaggcttgttacatgggtaaattgcgtgaagctgaggtttgggcttgtaatgatcccactgcccacgtagtgacataggaccatagggagtttttcaacacttgctcacctccctcctcccacccttttggaatcctcagttgttcagtgtttccatatttgtgtccgtgttgcctccagtgtttagctcccacttataagtaagaacatgtggtatttggttttctgtttctgtttcaattcactgagaataatggcctccagttccatccatgttgctgcaaggaacatgatttcatctttttatggctgtatagtatttcctggtatatatgtagcacattttctttatccagcccaccattggtgggcatatgggttgattccatgtcattgctcttgtgaatagtgctgtgattcacatataagtgcaggtgtctttttggtagaatggtttattttcctttgggtatacactcagcagtgagattgcagggtcaaatggtggttctattattagttcttgagaaatctccaaactgttttccacagtggctgaactaatttgcattcctgccaacagtgtgcaagcgttcccttttctccacagtctcaccaacatctgttactttttgatttttttaatatactagccattctgagtggtgtgagatagtatctcattggttgagtgtggtttgctaatattttgtggaggacttttgcatctgttcatcagagagatattggcatgtagggtttttgttgttgtgtctttgccagattttggtatcagaaagatactggttttgaattaggagttcctcctccttgatttttttttttttttgaatactttcagtagtatctgtatcagctcttatttgtatgtctggtagaattcagctgtgaatccatttggttcagggctatttttggacattaggttttttattactgattcaatttcattacttgttattggtctgttcaggatttcagtttcttcctggtttaatcttgggaggttgtgtgtgtccagaaatttatgcatctcctctaggttttctagtttttgtgcatagagatgtacatagtagtctctgaggatcttttatgtttctatgggattggttgtgatgtcacttttgtcatttctgattgtgcatattcagatcttctctcttttcttgttaatctagctagcagtatatcaatctttttttatcctttccaagaacaaacttctcattttgtatatcctttgtatagttgttatgggtctcaatttcatttaattctgttctgattttagttatttcttttttttctgctagctctaggtttagttttgttcttgtttttctgttttttttttttttttaggtgcgattttaggttgttaatttcagatgtatcttcttgatgtagacattcagtgctagaaactttcctcttaacgctgccattgctgtactctagaggttttggtatgttgtatctctatttttgtttgtttcaaataacagtttgacttctgccttaattttttgtttattttagagtcattcagaaacaagttgattagtttcctgtatttgtgtggttttaagaattcctcttgctgttgatttctgttttttttccactgtggtctgagaagatgcttggtatgattctgattttttgaaatgtattaagacttgctttatgactatgtgttcaatcttggaatatatatcatgtgcagatgagaagaatgcatattctgtagttgttgggtggagtattctatagatgtctattaggtccaattggccaactatcaaatttattaaatacaaaattttttgttagttttttgcctgtctattgctttcactcgtgtgctgaagttccccactattattgggtggccatgaaagtcttttcataggtctataagcaattattttataaatatgtatcctccaatgttgaacatatatatatttaggatagttaagtcttcttattgaattgaacactttatcattatgtaatgcctttcttggtccttttttactgttgttgtttaatgtctattttttctgatattagaatagtgatccttgttctttttttgtttcctatttgcatgatagatctttctctatccatttacttgcagcctagcctatgggtgccattacaagtgaaatgggtatcttgaagttagacttgtttttagtctaatttgccactttttgccttttaaatggagtgttaaaacactatgacaggaataaaaccttacatatcaatattaactttgcatggccaaagttaatattttatgttaaaacactatggcaagaataaaacctcacatatcaatattaattttgactatgcaaaagttaatattgatatgtgaggttttattcttgccatagtgttattatctggttgctttgtagtattgattcagtcactgcttagggcctgtgggctatctgcttgcatgtgctttcatggtaacaaggatcatcctttccttttgttttcatgtttagaactctcttaagtatctcttgtaggtctagtgtggtggtgatggattcttttagcaattgcttatctgagaaagaatttatttctctttcatttatgaagtatagttggtgggatatgaaattattggttggcattttttttctttaaaaatgctaaaaatagtcccccaatctcttctggcttgtatggtttctgctgagaagcctgctgttagtctgatgggtttccctttatagatgatatgactgttttctctagctgccgttaagtttttttctttcacgttgaccttggatagtctgatgattgtgtgccttgaagatggtcatattatatagtattcttccaggaattctctggatttcttgtatgtgcatgttgacttctctggcaagattgaggaaatttccctgaattatatcctcaaatatgtgttccaagttgcttagtttctcttatctcagaaatgccaatgtcactttacataaccccatatttattgaaggttttattaattgtttaaaattatttttttctttatttttgcctgcctgggttgattcagaaagctagtcttcgagccctgaaattcattcttctgcttggtatagtctgttgttaaggcttccaactgtattttgaaattcccatagttaatttttcaattccagaagttgtgtttggttctttcttaatatagctatgttgtctttcaaatcttggatcatttttctggcttctttgtgttggatttcaactttctcttggatctcattgagtttctttgccatctagattctgaattctatatctgtcatttcagacatttcattctggttagggttcattgcttgggagctagtgagattctctggaggtggtaaaacactctgacattttgtattgccagagttcttgtgctggttccttctcatctgagagagctgatgcttttttcttttcttttttgaatttgctattgtttggatggagcttgttgattttaaattcttttttcccttgtgggtatgactgtggtgtaaaatgtgtatgggtggatcagcttcatttctgagtgctttcagggcgccaaggctctgtatgggttccttggttgcagataagtttgtgcggtggctgagacgttgcttcttgtagtgatgtaattttgttttgtagtgtaattcaggctgcagcccagtaggtggcacttaagagtgagcgccagaaggtaggggcaagggcagaagcaatggaaaagtctgcaaagtgccctccttcagcgcgtttgccttcagtgggagtggaattgctggagaagccccaaaagtggtctctttcagcccacactctctcggttccgctggggagagccaccttcgagtccgcaacagtacactgaagagggatgagagaggtgagcgatgaccccttctcgacaaccattccctggctttggtggcgcccccttcagtggctagcgcagtgctcctgtttcctttgacccaacctttgacccaagaggggctttagccggctacatccccctcccttaggggccgactgaaccgagggctagatttctaggggagtgggtcccttcccttaccacttttcagagctggtgggttactgtcccccaactgaacaaggaagccgactggggaacccagtagttgatatgtaagggatgctgggaagtgctgggtaaagaagggtgagtccctggcgagggctccacccccaggcctgtgcccacggacctaggtgaggacaggcactccagcctttgggcccaaatgttgcatttcccaagaccaacctagcctaccatgccccctaccatcctgtgcctataaaaaccccaagaccctagcgggtagagacacaagcagctgaaagtggagaggacatcgaggggagcacgctggtggaagagcacaccaacagatgctgccacctggcaggccgtccagcagaggaatgacgcggagtttggtcgtggcagtcataggagagcccgggctgctgagcggctggactccagggggaaaccatctcccttctggctcccccatctgctgatagctacttccactcagtaaaaccttgtactcattctccaagcccaggtgtgattcaattcttccctcacgccaaggcaagaacccgggatacagaaagccctcgtccttgtgataaggtggagggtctaattgagctggttaacacaagctgcctatagacggcaaaactgaaagagcccatggtagcacatgcccactggggctttgggagctgtaaacatccacccctagatgctgccgtgggatcgacccccacaacctgcatgctcccctagaggtacgagcagcagggcactgaagaagcgagccacttctccagttgcacaccttgcaagggggacaagggaacctttctcatttcgtagcaacacacgcagactggttccaggtctcaaagctgcccctagctgcatgtcttgccacccagaagaaacctggcttcgggaactctcctgcccctgcagtcttctaatgctttatgtctcttctctatcgcatccaagcattctctcctagactatctgctcagaaggtgtccacttactattctggcgtttctctgttggggagccacacactacctgcttctgctcagccatcttgatccctttcatgtctctatttatgaaggatgaaaatggaatggagacatggagattgaggattgatgatgaggcttgttgaaatttgatgataatttcactaagaaacttagaaacagggccagggggtaataaatgagagacacaaagagaatggagtaagtagatatgatggacttgcaaagaaaaaaccttgttgaagagcagacgtgagctaatggactaagagaagcatgcaagtggggagactacttctgatagtaaacattttggaagagtgtgccatcaggagaaagcccgacttcagtgtggtcaaggagctgagcaagttatatccagaagtgatcaaggatatttgtgagtttgcttacaatatcataaaggcaggacaagactcaaggaagattcctagggaggaaactggtggggaagtcaaggccaaactgggctggataaggtagaaagagcatattgatgaaaataacagccttaggtgggaattgtagggggtaacttgaaggggatttgaatacaggagcctgtgttaaaaactagctttttcttttcttgctttttttcttagaaatgtatagaacacatccatttattccaacactccaagtgaggaataaggtttgggctcagcttgtagtccgcaccaatcactgagtattattttgaggggcatgtttacggggaaggtacgttgctggtgggattgtttcaaagtcttaatgcaagtgcctcaggtctattgctagacatttagaattttcttggttttttgaaagagaaagattagggatagttaatagtagtttaaaagactgtgcaaccttagtaacatttctttgcaataattaattaaaatcacaaggaaaatttttgcaaaagtttgggcatataaaataaatgaaagttatgactaacagttcaactttctcctgatgtctcacttttgtgagaactgatgtagaccagaaaataaatttctaggtgttttttgtttgtttgtttgttttgttttgttttgtttgcttaggttgacagatctaattttcatgtcaaattaggacactgactttccctaacagatgttcaggagctgaatttgtatcctaattctagtcttgctagtatttatttttgagacctgcaatccatcattatactaacatggcaatgcctaggaagtttaatggctatacgacttctagaaagtgcctttattacatatctgacacattgcaaattcacaagtggagtacaaacaatttcagcagcttagatgacattttccttcctgccagtggtctgaactcaccaggtagcaacacccaaagcattacattctgtctccctgagttgcattgtatttttgatatcacagcataaactgtcaaaggaagtatttctctaattttaattggggttactagggtcaaagccaagtttccaaagctcattttgtttttatcttattatcatgcatttatagtaagccatttattttttgaagcaatccttattataacttggaaaaaaactatttcgtaatgtggtcagatgtgattagatcactgttttatgctcagacgtatgttccaccttttcccataatgctgtgacatttggggtttgtatagcttcatgaatcgaacttaaacagtaatgcattttcacaaataaatagaatcactcttcctacctattatgatggatcttaaaatatcctgccacatctctctcgttattcattcagtttctgatcttagtaatttacctatacattaaaacattgtaattatgtatttaaatcaccaggacacctatcatttggtctctaaaactgagttgctggttgttagagaaaaatgtatttaacttgtatttatgaatataactggatgagattctggttatttaataggcagtttaacttgagaaacagagtagatgggaaaaatgagaacttactgtgctttaacaactttacattaatttgttggttcattgtgagctagtttattacagtatattgaactgtttaccaaatagtaaactcgattccagtgtttagaacatgcttttttaaaatgacattcttaaccattttgccttattgcaaggcatttacgtatatacattgagaagctgtatctgatcatgtttctgcagagatgtgttatgaactgctttagtacacggatttttgaatcttaacaaaggattttggccacctgcaaaataagaggttttcattctttttagaatagtcttttttctgggtccccagtgtatattttgccaaaatgcctaaaatattgcaataaaaaaactcagagtttggtaccaatctgacaattaatttttttaagcctttaaaagtatataaacaattttagccaatggacacctctcactgaattgaccatatagatcatattagtccattttcacactgctgataaagacacccttgacactaggaagaaaaagaggtttaagggactcagttccacatggctggggagacctcacaatcatggcaaaaggcaaggaggagcaagtcgcgtcttatatggatggtggcaggcaaaaagagagagcttgtgcaggggaactcctctttataaaaccatcagatcttgtgagacttattcactatcatgagaacagcacgagaaagacccaccccataattcgattgcctcccaggacacatgggaattgtgggagctacaatccaagatgagatttgggtggggacacagcctaaacatataatagacctatcagttccctacactaataaacttccctggtattatttccacagcacatgtaccctggaaaattagctccaggtgatgagaaattcagttgagggcagtaaaaaagaaaccaggtattctcacactaatttgagggtttaatctcactgggcctcctgtttgtttttagtgcattggaggaaaattagattttctgagtaaatagaaatgagcaatgttcctatgtatatacacttaactcttcaaaaagaacaacataggtctgtactggcacaagtaaaatgttgtagaaattgggtcaggtgccaagtgtgagcaacctcactctccctaatcagacagcatttcttatattatttctggattaatataagtaggtaatcttgaataaattctctagtgaatgttctacatcatttattgtcagtgaatgtacagatgggatagtcccagtaaatttttttagaaaaccaaaccatgttcaggatcatggatacttgtattcaaggttttcatgggcattcaaggaagaaagaggtgatgcaacatgccgtaagccagattctctagaaaacagacttggaggcagagatttaggcccaagaaatttgtttgggggtggggttctcttaagatcaacacctgtgtgcagtagatttctctctctttggataaaggcaattccaggagagagacttagctgagaagactcccagctgctgggggaatgaatgcctcaatcctgaatgggtatctgggttgcatatttgagcaaaacatcctaactttagtaaataaagctacagctttttcttatttctcctatctgcttcttgcctgggcaacctaaaatttatccattatccctgctatctcaccaggaagagtatagcgataaagagcaatttctatatcttatacattatatttaactataacatttattgttattagatagttagattaagtaagaaataaggtattcatgattcttttgaatctgtgtgaatatacatatagttaaatagtgacattgaaagtatggtgaatttttatatcatctttctggagaaatactgaggaaaatacttgaattttgcataaccaaggcatcagttactattcacaatgagactacagagaaagctttccaaaatgtttaaatgaaatatgctttcaatgttatgtggttttcctgtgatgtagctacttaattagcattgtatcaatcaccactgacatcaaatatgataacttgctttactggaaagtcactgctcaatctcatgaatgaaattgatgaggtagaaggtaatggtgcattgccaagaaaacaagaaagaagggagctaaaaattgagagttacctactttgcagtatctgctttatatatggtatctgatttcagtttatctgaaccctcccctggaagtagctattatcaactttatgttatttacttactcattttattctttttaaaaagaataatgagatgttttaaacatagagaaaagtgcacagggcaatataaaatcacatacataatcatctcccaagagtaactaatgtcattataggtaaagtttgcttcatatcattttaaatataaatattgcagatatgcttgaaatatatgttaggccatatgtgttcaagctgaggaaaggtaggttcagagagaaataatcttggccaatctcactctgctagtaagtagggctaagatttgatcgtctatacgtggatcgtggaactcatgttctttccctccactatgtatacttcctctgtactccctgaagacttaatctggatagagatacattgcctagagtttctctatagtgggagaaatgagccttttactttcgtggtaccacgtcagttgccaattgattctggcacataaaaatgtattatatctttacctgtttaattattttctgtaccacatcaaaggaacaagataaatttggttataatagtttattttactttaatttactattattagtcattgcagtacacaaatgcagatgtctgaagggatgcacaaagatgacaaatgaggcatgtaacatataaagaaatactacatttctaagtggtttacattatgtgtatgaacatgaattacctgcatggattatttttaagttcagaaactgtttttagttggttttctttcttttctatagctgttatttatgtctccagcttcatcttcaaagtggagatcataatatttatctcataagactcttaaaaaatgagataaaagcatttgatgaaagcatatgaaagcatttgactgagcaattagtataaagaagctacttagtacttatttgctatggtcacctgaaaagaaaagctattttgcatgcagtggtagggttgagaaacagccaatatattaaatattttaaaatatttttgtttaagttcaaccacctactttttagaaaatcacttagcatatgaaatttattttaagaggatacttactccacagttgctttagaagaaagaaaaagaaaatcagtttgtaaaatgagataattgtaagggtatctcatctttgtagccatatgagagagtccaaagagctaagcaaatatttgcgaaatgatatttttactatactggaagtaataaacaattaaaatgttgttattaaggcagtgctgatattataattttactatctctagaggaataccagagatcttattaaacacatgcttttttaaagttgaaatcttagataactattatcattactatatgtgtaagaaaacaacggcatggagaaagatgtgctctatagaaaactggtaggttattaaaatataaagaaatagggagaaaactgaaaattgcatgatattgtcaagtctcccttgggactcacccacacaacagttctttcattgcaagtttcttttttccttaatgagtcattttgagttctttttaatgtgggcacaaggaaacaaataaggattcttccatgcagctaaggcaccccaaatcttattaattcaaatgttgagagcattgaagccataaagacaataagaatactgaaacaccatgtatctgctttcatttaaatagccaaacaattctgtattttccaagtgggcttccttaatatacatattttaaaccttgtaaggtaattctccagagaaatatggaggtctaaaagacaaagtaattccatttatcaccttaaatctcatttaattagggaataattctgatatatcaagaaagaaactaattactgtcttctagatgcttgtgcttttgtaagaaacaaaagagctcaagcaagtagaagcctcaggaagagagcagtattacagagggaccacagcaacaatgtttttttttgttttttttgttttttttttttgagatggagtctcactctgtcgccaggctagagtgcagtggtgtgatcttggctcactgcaacctctgcctccagggttcaagcgattctcctgcctcagcctcctgagtactaccacactcagctaatttttgtatttttagtagagatggggtttcaccatattgtccaggatggtctctatctcttgaccgcgtgatccgccctcctcagcctcccaaagtgctgggattacaggcatgagccgtcacgcctggccaacaatccttattaatattaaaatttaaaaattggcttgaactggagaacacttcaaagctcatttaccacagaactttgtcatttttctccttatttgactcatctcagttggaaagcacagatgttttatgcgtctgccttgctcccactctccctaaaattttacttaccagctaaaccgccaatcctaatacatccaacaatattttaccatgaaaatacattcaatttttgtatttagatgcatacaagtctcctgaaattgtgaaatattccaactgtacttggaaagctctctgaagatccccccctcaaaaaaaaaaaaaagaagattatctctagtggttatattttttgaaaggtttattgttctattgaatatatatctagttctttttcataaaaatgaatatcctggctttaagtaactgtttgctaagcacagtgtgcacagctatgcacacactgatatcaccattgccaattttattaaaagaaccacaatacagagcaaagagaaaaagagaagtgtccctattaatggtatttcaaatgcgtatttaaacagcttatctactccaaactaatttctgatagattaaatagctgtattccaaatcttacaagatgcacatctctcctctatttctttctcggcttgcttcagctgaatagctcaaattgtttggcactggtaaagcatgaaaatgtgagataaaaaaggaaacgaagctacagcctgagtggcctacaggccttagaaatggcaacactttaaaattcattatattttacattgcttcaacagttacacattttttttttttttttttttttggctcttgatgatgtcagaagatttatctgggatgtctgtctccacgggtaaatagtgaccggggtgaaaactgagggaactagggagcacctagaccccaagccttagtagtcagctctggaatgctccctgcagtgtggggtgtgagtgtggtgtctctgtgtctctgtgtacacactgtgtgtctgatgtgcagaggggaaggcagggaagaaatactatggcagacagtcacttgtggtagctctctaaagggatctggcacttcctgccatttcatggaaaagaggaatgagaaggaaataagcatttgttacatgcgggatctcactggatgctttcagtgctagaagggagctatttctcctcctaacgtctgtaactcaccagatttcactaattcagaggttgctttgaaactcagagtcaaattcatagccagggactaagtcttcatgatgtgcctttttgttttagcctcctttccggcatgttttttgtgttgctctccttcctgattactttttattagtgctatcttagtttatgtatttttataaactgccttaaatgctttctggaaccactgtgcatttaatcaaatagactaataactaactaggaaaatgatagggctgatagcatcgtctgacccatgaggaagctgaatttaagtagcttgtccaaggtcactcagcaagtcccttgtgctgtgagtctggttcttggctttcagtcagtattttcaagttttacctacttatttcctcttaactgaacacgaaaaaaacctcaaatgcttatttctttagctatttctatttctctgcagttaatgtcctatcaacttgaaattcctcccctgcctttcactcccagtagaagtttcgctcacctttcccaggatgcttgaaataccttctcatgaagcatttcttatcctgaaaaagcatcattgttacatctcttcttagacgctcctttgccttctgttttcaatctagaaatttgtttctcccccatctccatactgactaggattttgtttgcttgtttcagtttagatcacaggtgttaaaaagatgatcttacatatttaaatgatggacatatgattcctattatcttctacttctatgcattcctgatagacaactcttaggctggaaactaaaacaagaaggcctattaactatttttgcaaaataaaattgtattcttaaagttaagttcttgatgcagggagaaaacattttatgattttcattttacttcccacaataatacaagcatgtcaagtattgacctacaataaatgcttaataaaaacctagtatttttcagtcactttaacagggcattgtatatttaatgcattaacgctccataggccatgtctcctatgtactttgtatgctcagaaagggaagtaatgtacactggtggttaagaacatattaacctgagtacatctttaaacctcagctccactccttgcatgttgtatgacattggcgagtcatttaacagctatgggtctacatttcttcacctgtaaaatggggataataataatgtctatttaataaatgtattgtgatagttaactgaaataaaacatgtataaagcatgcaatagggcacatgggaagtattttataagtgttgtatgttattattaacctgtaaagaattcatacaagaaggcacagaaaaacatcaattgcaactaagatgaaaagtttgttgctgttagagcaggagtagttaagatggtatgtatttcaaatatccaaaagcttcttctatttctggagagcaaccatgggaagtctattgtggcattagatagtgccacagagaaaagacaacaggatggtgaggacaggagttgggagggtggagccaaggaatcaaataatgtggtttcctagatgacattcttttcagaagcccagaggtgccacatctattacaaagtctctaaccaaaccatatccatgaacctatacaagataaattttaacagagtgcagattgtctttcactctacatcaaactatagagtccagaaaaaatattttatatcatgatagtgataataattgaaggaatcagaaggagttgatcattctctacaagcttgttgtcatgaggagggaggtgaaaagcattaaaaaaaagcttaaacccttttcccaatatttcaaagtagctttgatggtatttagatagcaaactcattttaaagagaataggattttcacaaaacggaaaaatcaagcagctggcatagtaagttatctgaatttgatctgaattgacgtcagggagctgggaatgcccctggcaatcctgcattctctctctttgtgcagtattttgacagtagtgagaatgtctgagtgttaatcattttctgacagtgtaggctctaatcttatgcaaaatgaaagcatttagagattttaccttcttggttccaatcagggcatttcttctagaaaaactattctgcagtaagattgtgtataacttattttacatttgtatatgtttatatatatttatatttatataataaacctaaaaatatgtaactgctaagtttggtagtagcctttcttcaaagcatcattcttgagaagagagtttattttgtaaaaccttactggtagagacataaatctaaaaaacaaaattcaatccagacttttgtatccaaatatgaatgttaatttcctgggtatatctttttttaaaaacttgcagtgtgggtatataagcagggccagatgtctctgtgttaatcatttctactctttaataaataacggtggcgtacagtgaaaataaagcccagatggctgacacattgcacaaatcactggatgcactgtatattcatttcatagtttcctgaatactaatagatgatagagtcatcatctttttatctgttcctcagtcaaataacaagtaactacttactgtgtcttctaaaagccactgtgctagtggctaggtaggttataaaaacccaccagatattgcagatagtaccacaatataatttgctttaatctctatgaccttcagaatctattacatcctagtcttccctaggagactggggtttcttggaattattttaaaaaagtgatccaaaactggatctgattttgccatggggattgcttaactaattggtttattagcttgagtctcatgcatcatggtggatattactggttgtcaagttgtggttggtgaatcgtagacttttagaactctcagagaaattcagagttgacccacattacattttacagatgagaaaatgtgaaacaaatgactaaatggtttcactagagccagacagttactgtcagaattgaagcttaaactacaggctgctaacttgtagtctgcagcttttgctagtatgtatgttactttgtctcagaaatgtagtgaaattaaatgtagtgagattaaaatcggtatcacaggaatgaaggtgcagtaactttgggtttgctgctgccattgactcagggtgggatgaaagaaggggaacggacatcattgcacctgcttcatttgtttgttctagaaggaaaataaggaaatgaggtctggctccacacagtgtttcagtgggggctttaactggtctagattatctagaatttttcaatatacagaacttaataggcacagacactcaaatgataggggagtcaagtattcacaaagatatgacatttacagagccagtctgcaaagataaagatatgctaagtggttgtctgtagacaattatagtccattacaagttgagcataaaaacataagcattattcatcagatactgaatcaccagttagtgctggtatttagatgaaaacatttggcttggaggggaagcccctcaaaaaccatagttttgacttgtttctaagaacctgcctgtcatggaaaagcctagaccctagtggaattccccagggatgttttacatagttgggattctcagtagttgatgatattgggaagcagaacataaccagaggagctgggagtcagccctgcccaggtggggcccaagcaaaaaccatactctgcctttccccaagtcacaataaattgtgttctgctaagttgtagttacactgtctcttcaaacagagaccataataatctttgctgcatttattcagttttatgtttatgctagtgatgtttgtcacttagttaaaattagctttaatatggaagaagagggtatacctctttctggaaatgtaacactcagccttaaaggtaaagggagcagcaaaggtgtccctaaaaagcaacttgcatcctgagcactgtgtggatagaggccactgttgccagacatccagccttagcaggttgcagccttagcaggttgtgctgtctttgtatgtggtcattttggtaccatccagaacccccacttactctcctgctcctccaccaccacctccagtccctggttgcaatgagccacacaaaacagaggaaagtaaacgggcattaccttagtatcagcaatgctgggatatagttctgctggtagctcctcctaaaaatacacccctaaaaaataaaattgtaagaaaaaaagagttaaaaataaaaagtttcagtctccttgccctgggcaggtccttggaactgtagaggattttaaaggctatgaaaattattttttatggaattccagagagggggatgggctcaagtttatatgtgagatacatatttacttatttaatagatttgaaaatttatttctatgtttattagtcagggttcttcaaaggacagaacctatatgatatatgcatacatagaaagagatttattttaaggaatttactcccacagctacagagactgagaagttccaagatctgcagccaataagctggagacccaggagagctgctggtataagttccagtctgaaagctggcaggcttgatacccaaaaggagcaaatgtttcagttcatgtccaaaggcaggaaaaaaccaacctcccagctcaggcaggcaggaggaatcctctcttacttgtggaaggttcagcctttatgttctatgcaggccttcagctgattggatgagggccatccaaatgtaggagagtaaccgctttcctcagtctaccagttcaaatgttactcttatccaaaaacaccctcacacacataccccagatgatgttaattaaatatctgggcacccagtgacccagtcaaattgacacataaaatcaatcatcccaccatgtatatttattcatatgtaaaatagtagatttatgtaggaaatagaaaaatgatggttattattagagaggagcataagaaggaaatttgtgatttgaagatttagagtccattattgctaatgaccattaagcaagaatcaaaaaattttgccctgttatgataatgatgtgtacaccattctaaaaataatccttatttactaaggcatcacaataacttctatgggtccatttcagacacaacaagggcgaatcacctttttccttttatttctttgacttctgttgaatattttttatgaaaaatcttgaatttctaagggcatattcttttatcactacagggatgattttgcctgaatatctgaaatagcattgcaaaatgattttctttagcactttacaactgtaaaagaaggtcattttaaaggcagtatttaaaagaacaatgccacaataagtggctcttctcattgcccttacattcttttaaaaagaagagaccagtagacaatggttaaaccagcatgtttcaacaaacacatcatcacttaattaattgaagcaactttccaaaagtattaaggaattaaaatatgtaatgctctagaataggagaagcctaataagccaaataagttcaactatgaaaaaatatctgtcattttgttaattcacaagctggagagggtatgaatgttaaggggatgttgtagctagcctagagacttactcttaggtctaaggcaggtacttaaaatgtgagagttgaaaagaaatttttttttattatttttcttttttcctgaagaagtgggttttgtaagcacaaaggatgtagagaaaaaccatgctttttgattcagactgcagtggggaaggtatgcaaattaacttataatttctatgccaaagatttttttttggctctttctctaaatattttactaatatcttacggcatacagattggtctcccaacttgcaggagacattttttggaggttgtatttttaatttttttttcaatactgaaaaattttataggggaaatgagaagagccagatgatgaatggcttcaacaaagggactgtggtcaataatgacagtgatgggaacaacgaaatgaccaaaggtcttgatttccaagaaaagtcaaatcatgaaggcttcatgttggaggagaccacagaagtgtggagactcaggcaggttccgggattttaaaactctaccgctggagcagcctttccttaccaccacccaaatgcacccatagagcagggaataggggtcagaaattatggagatttccacttgaagggttccatgggtctaattcaactcccattttagagatgaagcaggtgagtctcagagaagtgaatgatatattcaggacatatggctaaggggtgaccaactgcagactaggcttcttgactcgaacttttttttttttttggactacattgtattactccccagtctattaaaaagtttaactgccatattgaacaagcaagactcatacagcaaagtcagaaaacatttgcctttccctccactgtcattaaaatccaataaagagttaggtcttagcatgccaatgggactctaaaaagaaatcctctctaggattttttgtctccctttgacctcttttaaaggctgtatgtggggtataagctaacggtcagaatagctgcgcctttgcaagtcctaccagatgttgcagcaactccagagtgtaggaatatttgccatctattgttttgtccttggccttgttaggacttctactgcaaatagagacaaagagccttcaggaacattctgctgtgcaagtggtcaccaagttcatgtgcatgacactgccctggtcattgctgtcctggttactctgcaaacactaaagccgattggccttgacttaaaatccatttcaagggaggagaataacataaattgttttaatcagggcaagttttattgtaataaagtaaatgacacaaaggcaggaactacactgccctattggttattatcacctgtctggcacacagtaactgctcaataaatgaatgagtgaacagaaacctattaattggatcaagtaaaaagagacttattggaaagatacaaagtaatttaagaaaaatgtcatattggaaaataatgcctggcttcatggggtattcccatcctggcatattggacccattaacctctcagtgaatctcagtgacccaacatggccacatgccatgatgatgtgactacagtgcccatcgtgaatgaagggaagcagaagcactcttgagtggtctgggttggaccagaacctgggtgttgggtggtagtgggaaatagataagggaggtaatctgtgacattggcagatggcatttttattaaatctcagactattcagagagtacgtgggaacattatcttcattgtaatatgatcttcttgaaaggatagttattcaaataaaaatatatactttccatgtatatgaacaataatgttgcatttattctaatgttacatttattctaatgtaaactattctatcctttttgataactttgcaaactgaaaactattactgaacagtttgaattaaaaaaaaaagcttggagtactataatattcatgaacaaaaatcttggagaatttcttctttaatgaagttattgaaatgctcatgcctataaaatttttcaatattgaaaaaaaattaaaaatacaacctccaaaaaatgtctcctgtaagttgggagaccaagagaccaatctgtatgccgtaagatattagtaaaatgtttggagaaagagccaaaaaaaaatgcttggcatagaaattataagttaatgtgcatactctccccactgtagtctgaatttacaagatatatgccatgattattctctcagaagattttttatgagttcagtactgtcttgattaagcttatgactaaataaacttcttttcatgacattgtcgaagagtatcagttttcagacagtgagaaaaggacaagcagctggaatcagctgagaacccaacaatctattgtaaaaatacggtttattttaccactcggcatatgtattcatacacatatatgtatattcaactgagacaaaagtttcacaaaatcctgcttactcttactacatgtgatgatctctgatacatgtgatgatctctattctgtttgttttaaagtttgtcacaacacatgaaatttgtttcacaaccttcctgttggtcatgagctctgtttgaaatatgcagactcaaggcaaaaatgtaaatgggaaatttggaattattatccaggttggaaggattaaaaaatagaaaatacgtatgatttcacctttctttcttctgaggccagataaaggtaactagtctgaaatctagttatttatttatctggaattgtttagggttaaccatagctagtaagggtagactgtggatgtagtacagtagctacttaaaagctgttatgtcatgagcctcccaaccatgacggtgcttaggaactctccagggagcattgtaaagtatgcaaaagtcctggaaactctaggccaagtgatttagaatctctgagcatggggcctgagcatcagtatttttaagaaactccccaggtaattgtaatatgaagctaggacccaaaccatcaatagcaactctgagtagatgcctttgccttgtgcactgaatacttttgtcatgttaacaatgcttttttgtcatattttatgacgtgtttcttgtgtatcacccaaaagcaacagatatttttgaataacagaggttactatgagcatacagttatgcacatcattgaacctcaaattttaagatacttattactaaaatgttatactgtgatttattgaaaattttatgaagaattcattgacaggagcaggttatatgttaagtgctacttttctagttgaatgtggctcaggagaaatctagttaactaagtcaaatagatagtttttaatacttatatttatttaaatagtagacttccataatcctcagttattttatgtcttccaaaaccaaaaataatttctttaattttgtcatagattttaattgaaattggtgaacatatgcacacatacacaaaaactgtagatttagtgtctgtggtatgtaattgatgaactgttttctaaaaggattttgaacgtttagaaaactaattaagatatttaaattattgacaaatagaggatctttctgtacccaatttaaaaagaagatacaatgatttgtggttagtgtatccatttttcaaacataaacagaaacttcagaagttcttaaaaacaggttgtccttttagataatttctacatttcctctgaaatcttatttctgaattaagtctagatgtttacaatctatctgaaaaaagtaatgttgttataaacctcaaatccgtgctcatacaaattcttaccatttccaattagataatactctggcaagaattactaatgcctgaaaaaatagatgtaaatattcccatatgatggtaattattaaatgttatcaactaagtatagtgttttgttttaattttaacttttattttagatacagggggcacatgtgcaggtttgttacatgggtatattgtatgatgctgagatttggagtatggactctgtcacccagatagtgagcatagcatccaataagtagttttcccacccaaactctcctccctcccttccccttctagtagtctgcagtatctgttgttcccatgtttccgtccatgtgtactcggtgtttagctcccacttacaagtgagagcgtgtggtatttggttttatgttccagcattaatttgcttaggattatggcctccagttgcatccatgttgctgcagaggacatgattttgctcttttttatggctgcatagtatttcatggtgtatttgtaccacattttctttatccaaaccaccactgatagggtgggtttcatgtctttgctattgtgaacagtgtggagatgaacatatgagtgcatgtgtctttttggtggaatgatttgtattctttgggcatatacccagtaatgggattgctaggttgaatggtacctctgttttaagttctttgagaaatctccaaactacttttcacagtggctgaagtaatttacatgtccaccaacagcgtataagcagtcaatttcctccacaatcctgccagtatctgttgttttttaactttttaataatagcctaaatgtagtattttaaaatatctaagagtttcttacctgaacctagccaatgtattttttcatcttattaaattacatacacttttattttagccctcattgatttattaggtatataagtaagcatattttgtagagattctttaattttttttttttttttttttattatactctaagttttagggtacatgtgcacattgtgcaggttagttaatattttatagcactaatatgtccttttgttttttaagaataaaatttataaattgttttataagagtaaaatcaatgtaatagctgctgctgctcagtacaattaaacaagttacagaaatcctttactcagtatcactaccaaattttttctaatattctcattttaattttttgtaggtggtttttacagttgcctttatatattctgtcaattgtgaatagaaattcaaattcttgaatttgataattgtgtcatttttgtgttccctagcttttatttgtagactgttggtcctattgttctttttcatgtgttactattatctctggatattttcttataaattattgaaacttatgagattcaattaccttccaaagtgatttattgttacgtgctgtaatgctattaataagtgtagtttgcaagcaatgtttcaaaattttgtctacttaaaatttagaacaggatatttattttgtaatttttggatagatagaaaatctcctttctgccatcatgaaactgataaatgagttatagggatgggaggagatggacatttgaccacatgcaatgcagttttccaaagtatataaccataatctatattaaaggtaaatgcagtgtcagatgggcattactttatgcaagattgtgttgctcatgaacttaccagccaaaggagactatctctcactaaggcttatgtaaaactgccaggagagaataattacagtgggagtaaatttgaacacatgcagtagaatgtctaaaagttaagcttctcagagaaaatgtacatatgcttggattttacaaatgatgtatttccaggtattcactaggcctgctaaaataagttagcattttttaaagataaatatgttactgaaatatatcctacataaagtaccaaattataggtttacagtttgatgaattcctgcaaagtgaacacatctatgtaatctccatcctgatcaggaaatagaacattgtcaattctcccagaagtccctggtaccataccccagtcccctcccaccacatcacataagattaggttttgtctgttttgtttttttaccattttgtgttcttggtgagagtgctgcttttccataagcaatttcactgtatccagaaacagaactcagttaaattttaaggccactattttcttcataaaatagagggaagggagaataggttggtgggaggaaactcgtgcttctgattctttccctagcctatgatcaacataatcatgccttaagaaccttgctttctgtctttgagtgacatgcttggaaaagtttttgaaaacatcagtttgtgttctttacatattcattgtataactctattttatatggtattaataataaaatggaaacaaacagaattgtggaggggaaaaaaagagaaattttaaagacaagcctgccctctaatttcctttttgccatgagtagtcagtgggaagactctgggagcttggggacattgaggcatacagcagtcaacaagcctgagccctacaacgactgagtctggaaagtttagattctgaaagcctaaaaaagcactgtgtaagaggctaagccaacctttttgttgttgttaatctttttactgggagacaagaatggaccttagggatagggtaaaaaactgagagcccccagcccctttaagatattttctctaaacctcttaaagttaactctgattaatttcttggttagaattcaagttatggttcctgctctgcaaaactaataggtagtttaaggtgggaaaagtaaaaattcttgccatctcctacattgacttgagagtgaaagtaagactacagatttgttatccccaagacagttgtagaaaactgagattatgctttataataccctatttcaagtggggttaatatataaccatggttcttagccttatttggggttagagacccctttgagaatctgaataaagctatatgtcttctctgaaaggtgtacctaggtacacataatttagccactggccttgtccgtttgcaggccccgtaagctaatgcacagttccctctgaggatccctcagctttattctaaagtctaaaattctctaacggttgccagtggaaataatccaggagtgatagaagtatggtccttattacagttatctaggaaggagaccacactgtcttcatcctttacccttccttggtttcaccttcttccttcatgacttgaagattcctttattttctcttacttccaactcaaaattatattggttcatgctggtttcctttgtttaacagaaatattccttttgcaaaatggtaaacacctttttagggggaaaaaaaacccaaccaacactgttcctacagttgtagatagtaattaagtcaaacccttagttggttttcatttttgaatttaatactgcaaaaaattaacttttttgcataaaactttttatgacttcagttattaatattttattattttgattaattttatgtaagtcaagatagtctaggttattctgcagtaatccaaaatctaagtggcttaatataacaaattttatttcttgttctcttcatacatacccaagagggattggcaagaggctctacttattgtagtaaacctgggacccaagatgattgatgctttatctcaactcaggcttcttcaccagggaaaaatgatgtaatgaatccgtcacaggttgcctgaactttcacctagaagtgacacataccacttttgcttaaaataattggtcaaagtatatcccatgttcatgtaggataccaaaggggaggctaagggcaatcttaccatgtgaccagaaaaaggaaagctagaagtatttggtagacacattcactcttttctgtactcctttccaaattctcctaactttttggagatttgattgatgttaagcagaaaaagagggtttgagtcttatttttggtgaaagaaaatattcttggttaactttgtcatataatatatctgaacttaaaataagtacacagtggcatataatgaacttaaaagaaataaaatactagcaggaatgtaaaaaacctgaacataacactgaattgctcttgttagtgttatgccacttagttccatctacagtctagcccttgtaataacacacacaccgtgattttagttaaataggaacatgcccctttctgtttcatttaaaattctagtcaacacaaattcttctagaaaaatgaattaagaatgagtactattcccagagtacattctggtttgtctataaattctaagctaagctttatatgggaactgtcaaaggcacagttgcaatgttgctgccttttttattcaggagaactgacttctgttgtcccacttggactgatatgttgagtgatgaaaagctgggcaaatctcctcagtcactttcttctgatagtttactttatggcttccttagtggtctgcatcattctttcagcctgaccatttgcttgagggtgatgaagagtaatgatgacaggttagatgagctctagcttcacaaatttcttaaatgcatctgaaacaaatgcagattcattgtcaggaataataacatctgggaatctggacattgaaaatcattggtacagggatgttcttgttgaagtagagacactataaggcattttgagatggtagccacaacaaacaagaaattctcctccttgaaaaataaaagaattattgatcaaatcttcctgatcattttttataggaaggaaaagtacctttggtggattatatggagtggcttggtgttgtctacagtcttctaaatgacataattaagtacaggctttagatataattattagtgtatatatcattttaaaattcccaggtgaattgtaaacattattgtaataatgtgataagttatgtgatttctctattctggccactcgaaattaagaattaaagctttgattagaaattagagtctaaactatatatttgagaggcattagtatagttgaaactatgagagtattttggtttactgagctagtttatgtgagaaagcaaaagacctgaaacagtcttttttcagtatgtattgtattctagacttttttctaggtcattctttctttccatattttctcttttttttttttttttttttcatgagaaagcagaatgattcaaactgggtataactatattaaaggccatgaacctagctttgtctgacaataaaagtcatgctcttattgctagattaaacttcctcctgtttatagtgtctgatgggattaaagagagaggatcttatgtaagtaagaaagtaatctttttcctacaatctgcttttagcccttactttcctcctatgttgagagcatttctagtccaaagttcttttttttaagtcattaagatgtattattcaatctcaagtaacttttaatccctttgtaaaaatattagctctttaattaggcttggtgtgcctagccagctgtctccagcataattttgggtaggcattagtatgttaatatggaactggcttataatcttaatttcaaagcatattggaaggcaagttttatgaatagtataaagagacttatatgacctgtcaaatcaattcataaaattcctattttgaaggggaaattaaaagtcaaggtaatggaaatgttatattcgtatattcgcaggagatgaatgacatggataggatgtctttgaaagttaatgagaaagctacttgccaggcaagttgttcaagagcaatgttagcaaatgaaatgggttgctgcctttggggaaatgatttatgatgatgaaaaccatctgggtttaggaggttggttgatgtgacatacctctcttccagcctttccactctctcttctttcctgtgcccagcataaaatcagtctttgcgtataaagagcgctatgcaagttggcttccagtcatacgaatatgtggtatgatttcaaataagattgtcattggatgctttggtcagcaagcatatttactttagatttgtatttactctttgtagttgaactggctaaactctaacaaagtatgcttcatttgactttaataaaatattatatttccaagaccgtatgtagtaatagcagaaggtgtgatttctctttttgcataaattggctcttcccttctctttctctgtgtttttcacatctccctactgtcatatatattctgacctgcctctggtagggctatttatgtcatatccataattgttatatattaaccatttgaatgtggaataaggcaagtacagtttaatttttttatataaaaaatatggaatatactgtaaatgagttctcttaatcacggagtagctacctctggaagctgtaactgttggtcttgggctgtaatatattatactacaaccttaaaaatgaagaaaacaaaaagacaacactctatgtgctgctagacaaaggccacagttaaagccaaactgcttgacactttatattcttcaggcctttttaacgaccttccctttgggtgatgcattttgtagctgttgtcacttgtacagcagagagggaaaaggaaatgaataatctgatttgaaggggtgtagagggatgtgagtcttaggaagatccttaggatttacagaagctataaagctatttgtgctgctttgtggtgctttgcaccctgtgtcagttaatagtttatctttaccccattttatgctctaagatatagatgatgttttaaaaatcattctcatagtcttctttcctcaagctccaccccaagttttctagctcctgaccagcactgttagcttttttgatttaatcttcacagtcttctcatttatgaaatacaaaatgaatgctatgtcaagacagacttggaaaaatcttttaaaatggcaatacaggctcacctgcaattaaagtcattccattccatttagtgtctttttctttttctttttgagacagggcctcactctattgcccaggctggagtgcagtggcaggatcatggctcactgtagccttgacttcctgggctcaagcagtcctcctgcctctgcctccctagtagctatgaccacagatgcatgccaccattcctggctatgtattttttaatttttagtagagacagggtctcaatatgtggcctaacctggtctcaaactgctgggcttaagcaatcctcccacctcagcctcccagagtgctgggattttgggatcccaggtatgagccattgcactcggctccatttagcttctgatgagtgtaaatattaactttgaggtcagttcacagtttgctgatattaggactgattttttttaagttatatttcatttaatagtggagcaccttaggaaaaaacaaatctctttatatatagaattaaatttgtgaacttttctgaagtacatttttatccttttaaatatgccacaacatctatcctgtaagtaaaataaatatttctaaatgtctaaagcagagaaatattataaattaattaaaatatttcctgaaaaacaaagtaaatcaatttctcaatttacattattcagataaaaatagctcaagaactagctaaacagtattagtgaaattgaaggtcaagagatgctagaaattagtcaactcaggtttatggaagatcttactatatactctgtaatattcaaaactatttctcggcttaattcactgatgaaattatggtattttggtagttggaattaccaactgtctgcaacagcatgaactgacaagaaaatagtgccctctatgagtaggagtacagaatgttatcttattaacaagaaccaggggacagtaggaatggacaacagcattggttagtggcacagaccaattcaaataatatattttgtgtgattttttttttccttaccagcagtttgttggtgaggcagaattaaatagggaagagaaatgcacattccctatctctgtccctgcagtttcattaaattctgaccaaattatgtgactcagcattctcagagaatagtctctgacaggtagcacttacaggagacagacccacaccttctagcatgtgattcttaaaactctgtgtgcagactggtgcccagctaaccacataaaatttaccaggggtgcttattaaaaatggaaattccaaaatcttacctccagagatgctatcttggtgggccctgagaacatcatgtttttgacgaagtcgcccaatgcctttctggcgtggtcaaaagcaagaagcacaatgcctttttgtgcttcttggttttgaccaagtcacccagatgattgtggtgcaatgcctttttgtgcttctgcctttagcgttggtttgcccagccagcaccagatcaggcagctctattagctgctgctatcagcacgtggatgttctctcctcttcgtaaatgagatctcctctactctcccaaaagtcccatattcttttgggactctttcttttgttagctcttgcttgtcaagaatggaatggggaaatcatttcctatggaggaagtttttctttggcttttggtaactgacagagtgaacagatttcttcgctgggtatgcactgtgccttctcccacctattccagagctgtcactcaggagcactgttcaaggccatcccctgccttccttgtgtagagggctttctgtgaccagcagacagtcaaagacatcgtatctatacacagatggcacattgatgaaaactactgatgtttgccacttattatttattcttttttcctaaatatttacaaaaattacttttctcttttgtatgccacatctgactatgtgtgttagtttttgttttttgtttgtttgtttgtttgttttttgagatggagtctcactctgtcaaccaggctggagtgcggtggcgtgatctcagctcactgcaaggtccgtctccttggttcatgccattctcctgcctcaacctcccaagtagctgggactacaggcacccgctaccacgccctgctaatttttttgtatttttagtagagacagagtttcactgtgttagccaggacggtctcgatctcctgacctcgtgatccacccacctctgcctcccaaagtgctgggattacaagcatgagccaccgcacctggccgtgtgttagtttttatatctatgttagtaccgcaaaaatgtctaagaaagcagacccttctaccaacactacaatgtctcatattgcaggaggcctcatagttaggaagacaactgttagcaaagcccttgtttctctcatgagccaccagtgtctggcatatctcaatgcactcttcatgatgctctaagctctaagttaggcctatggttgcattgaagctctaagttaggcctatgattaaagtcttctggctcataatgataaaagccattattgtaggcagttagaacctgttgaaggacagagacgtgatggattacagtctgagataatgtaagttgtttaaaaaagtgaaaataaaagaaaatcaaaactttgctttacctattcatttttaaaataaccaaggcataccccttttgctgtcttaagtttcagacaagggtgcaacttctacagtcattccttggtggctttacatgctttatttgccatgggccattaggtgctatgggtgttttcatccccactttggtgctttgtcaagacatcaagcatctccatgaatatactttaatctttcccttttttgtgttttgttttttaggtaagtacttttggtattcttcttccttaatgctgaaagaaaatgcagctgcctgatgtagaacaaatggcttttgaaagcaaaatccaaaagataaaaaataatgtgaacagtaaagaatgacaccataccagatactggtaagaattttaagtggcattcaaacacccctctctttttggagagaggactaacagtacaggaagatgcggggagggtggggagggattgttgccgtgcaagtaaaaagaaaattacagacagtgttcatgaaatattcatttacacctgcttattggttagatgaacagcctttggttctgagctggctcaccattcccaggctggaaattattcacttaaatgcagcttttaaacattttcttaaaatcctcaatggaaacagatgtgcacatgctgagggaacttttttttgatctttttctagaagagggttaaattagaaaaaaaaaccagtatttttaatatttaatttcatgtgtatagctatgaagctatatacttaaatgctttgtaacatatgatcatgaatatatgtataaacttcacccagaaaaatccataaagcttttgacaataaatgtgtataatctggataaatgaaataccagtgaactcaaacataatttatttcatgttttatgtcttctctttctcattttccatgtacaattcctgtgtacatatgaaataacatacaaaatacaattgtacgtatgcttcaatggcattttgcccaaattcatagtccttttttatatggccgtggatttcgagatttaaacatatatggtaaatagtatgtttctgttaacttcagcatagcccttttagtaacaagacattgtttactataaattgagattatctatccaatgtgagtaaatatattattaaaaatacattaacatttaagatgaacaaatagcaaaggttaaaaggtttcagagaccattacctgttactaaatcatttctctctcccatttactagtcttatctcattgagtttcctgctgtcctagaatgtcatccctctgtctctgctttatttagtttttgtctatattcaactcagaccctatatcatgtacaaagctttcctcaagtctttgaacacagactggtttattcctgccctaaaatcattttttaatagaatccatgtgttaattttctgaggctgccataacaaagtgccacagactgcaagcgtaaatagtaggaattgatttactgatagttctggaggctggaagtctgaagtcaagagagcagggttggtttcttctgaggcctctctcctcagcttgtagatggctgacttctctctattccttcacggggtctttcctctgtatgtgtctgtgtccttagctcctcttataacaacgtcacatttgattagggcccacacttatgacctcaacttaatcacctcctttaaaccctgtctccaaatatagtcatattctgaggtacgaggacttcaacgtacaaattttggaggtatatgtacgaggacttcaatgtatgaattttgggtataggattcaccccgtaacagcccatgttagtttctcacttcattattctctgattcttccatgtatattggttctatcttccctaacaagttcatcaaggataaggattgatcatatttcaagttttgtttacttcattcacagttcctagagggctggcatataatattaaatgctacatatttgttgtttgaaattactggaaaaagtagcataacaggaccaaatgagagcctctttttccaattattgctgactttagctcccttatctggacagaaaaaaacagtagcagaggtttgagtcaggcagtggtcaaatgaactgtctctgctttctttctgggaggcccaacagcattctcgtcagcaggagcattctggcgaaaggaaatgctgatctctgcaaatgggcaaaagtgtaaagagcattgaacccagcctcataccacagaaaacaatttgggcttgtggaaaataattacccagtgaagagtcttctgaactagaggcaggtttttggagggggaaatcataaacacatttgtggttgcaaggtagcagattgggtgagctgaaactaaaacaaattttggtttaagaaattgtattttaagttctgaagtcatacttaattcttaataattctaattgtacacacgctaatttaaatggaagatgtttacttcattaaaatttcaacactaaaatgctggttcagtttgttgtattactttcttcaggttttgttatattctatttttcataatttctagagccagcattcaaaagtaatttctgtgcttcaaaataggatcatcctaaattcaaattatatgtaaatgtcattgaatgcagatataaacatggtgccacaattttatagaaaattctaaaaaaacaaaacaaaacagaataaccatgttgctctcgtaccaaacgtgtctttgggtgggttactaagtccacctgagtctgagattctccatctgtaaaaaaggaatcagaatacctactttgggcagttgctgatattaaatttaaataagcaaagcagttagcccagtcatgtcaaaatagttgagcccaatgaatggtctttttctttatctctcttcaggttgaattttgcacagtagataatccatctatcacagaggtgtgcagatgtgactgattcattgattgaaacattcattgccccatttaaacaatgtttaggtattattatccactgtatcctggtttcatgctggatgttgggtaaataatgatgagaagaaacagacaactccaactttaatggagaaattgacattaaaagtctaaaaatatgtataaaattttaaaaaatcagtgttgtgtagtaaatatacacagtaccaggagattttataacagggagggtatgtgtaaaatgtcaggaaatatttctcctaggatgtaacaatgaggagagtttcagagtatgcatgtgtgcacatatgtgtatgtgcacatgtatggatatgtgttccaaaagtaatagtggttaaggtggtgatggtagtggtggtgtaggtggtgatggtggtaggagaagcaagagaatgaaataaataaaaagatgagtgtctgggaacagcatgtgcaaagtcctgatgtaggaaacagtactgaatggacagtacggtttaccaagggagggctggtgaggctgagatgaagagagctaacaggaagccagtaacttgagatgaggctagagaggagagcagaggccaactggagcaaaaccttatagacatattaggtcttctaccctaagaacaatgggaagccacctaattttaagagaaagcttaatggatgtgtgtgattcagtgcagggactgctaccgctcttaatcctcgaaatatcctgctaaccaggttggctttagtgggtggaaaagtgaggcccatacatattcaaatttgtattttgaaaagattttttttttgtcctccaatgcttttgccagaatatagaaattcaaagtatgtgtatttatagcaaatacgtagatgtttttcaccttataggtgtgtttttatcacattatttttgcacatatgattcctgcatgacccgagtgaaggggtgggttgcccctccacacctgtgggtgtttctcattaggtggaacgagagacttggaaaagaaaaagacacagagacaaagtatagagaaagaaataaggggacccagggaaccagcgttcagcgtatggaggatcccgccagcctctgagttcccttagtatttattgatcattcgtgggtgtttctctgagagggggatgtgtcagggtcacaaggcaatagtggggagagggtcagcagacaaacacgtgaacaaaggtctttgcatcatagacaaggtaaagaatcaagtgctgtgcttttagatatgcatacacataaacatctcaatgctttacaaagcagtattgctgcccgcatgtcccacctccagccttaaggcggtttttccctatctcagtagatggaacgtacaatcgggttttatagtgagacattccattgcccagggaggggcaggagacagatgccttcctcttgtctcaactgcaagaggcatgccttcctcttatactaatcctcctcagcacagaccctttacgggtgtcgggctgggggacggtcaggtctttcccttcccacgaggccatatttcagactatcacatggggagaaaccttgaacaatacctggctttcctaggcagaggtccctgcagccttccgcagtttttgtgtccctgggtacttgagattagggagtggtgatgactcttaaggagcatgctgccttcaagcatctgtttaacaaagcacatcttgcacaacccttaatccattcaaccctgagtttgacacagcacatatttcagagagcacggggttgggggtaaggtcacagattaacagaatctcaaggcagaagaatttttcttagtgcagaacaaaatggagtctcctatgtctacttctttctacacagacacagtgacaatctgatctctcttgcttttccccacacccgagatcttttaatattctaacatactcttatgttctaaatcagtgacacttagaaagaaatgttgacttgaacatccaagtacaggtgctaatttgacctagcagaaacattttttaaggaaatctctctgcactgagcacttgcattatctagcaatggaaaattcaaacaatagaatgattatcataaattcctttgaatacctttgttagcagagatgaaaccttggccacctggctttaagggaaagcttaatgagcatgtgattcagtgcggggactgttacctctcttaatcctagaaacatcatgggaaccaggtttgcatcagtaatgaatttttataatgtgaatctttgattttctttcgctggtaagaaaccttatttggagatgctatgtatgtgagtttaatctcattttccattccttcttgaagctttctaggttaaccacctgaaacagtggttactataatcagtaaagatttataaccaaagtataaggaattggggaatttccatatggtgtgtcctcacaaacaaacgtcatgtttcaatatgatatgaatgcatctccatccaaattattattttaactgtatatttttccctcagtcagcaatttatgtaacacatatatttcatttcatccaactcctaataagagacccctaaattaaccttgaactatgatttacaccttctcaatatacagtcaataattgaatttaatgactaaccaaggacattttagtcattgcaactgcttacaagattatatgtaaaggattcaggaataaatagaggggtctctcagtatgaagtttaaataaatacttaatgataaaagaaaaatttgtctgcagtttttttttttacaattaactttttacaagttattatccccttaggctcattccattctgctccctttgttttgaaacactgttatgacatactactgtcagtaatggaatgtcagaaaatagtacatatgaaagacacagttcattctactgttaaatattacatcattgaagggtttaaatcctaagacgtatctttgatttaccagcccagcccaacttcctatttgctctctgctccatttagtagatttcatgctggttgctggactaaacaagtcaaacacctgcaagggccctccatctgtggccagaaaagtgttgctggtggtatatttttgatgtttaggaagaaatattgatctgcttaactaagatggtcataagataatatggggttgtactcatctgattctcacaaaaccccagggtgctcagaactatactgatgtgttggagatgctacttaggaaattagaggaccagcatgcatgtcctttggaatgatgtatgccaccctatcatctgcttggccaacaacttgagccaagacacacctggggtatcttggtactacctagagaccctagctaattttgccagggtggattggtagaatccaaggaaatagttttgcaagtgacacaattggtggatgatataataagataatgaagactaaaataatttgaagaagggaaatggagataatttaggctaagttgttctatttgctattcttagaagtgttttcttcacatttagaagaagaacaattgattataaaatcactgctttgatgcattaatttgatcattctaaacaggtgatgaatattgtcttatgttatttgcctccattacttaatctgactatcatagaatagctaagaatacttcttaagaatgagagtttgcaactaccagtcacataggccagtatctgttaacaaaatgctagtaattttgttcattaaattttaaacattaaatctattattgcattaagacctattaaaatggacaataagtaagggccagatatatcatgagtagaaggagtccctttctactgagagcctatggaaaggacaactagattccagaaaaatctgttcaacttccaggatggcatactaggagaaataaattgggggtctaaagagtaataagcaggaaaaaaatctggttttctttgaggcaatgattagttgaagcctacacaaataaaccaattacaacattttgactgaactgagaataattacactggtagtcaactcctggggaaaaattatgaagttcaggctgtaagctgtctaggcttttattaacttgcattgttcttaactgattacaggcaaaaaggtcaaaacattttggcctacctaggtagccagatggtctagagataatttcttaattaccaaatgactgtgttttatagtgtcccttaggaaaccaagttttaaaactgtgtctaaagagaacctgatttaattttttgatgtttcttttatttttgcttgattatatattataatcattttgtaaaaaaaaatccaaacactacagaaatataacttggatgtttataatcttcgcttctctcttagataactatttctaagagtttttgtatacatatttagatttttgatacatgtaaatatatataatcttttttactaaaatggtaatttacaacatgcttttaaacaaacttttttttttacctaaaatttcttagctatttatgtcagtacatgttgctctatgaagttgtaaacagaacaaagcagcgtgctccccaagaggactcttagatatttgaaagtagcccataatggtaaagtaaattcattcctgactttgcttgaggaaactaacatcctctccatcctgccttgaggacaagtgtgttccttcatggctgacacatatcttggcagagcacatgtgctgcaacagcacacagtatggggtaggaacaggatttgagtgatttactaatcaagtgttggctagaagagaggagacttgtaccaccccgaccctgcatcatgcctcttgctctcctctttagggtgaatgtaaaggggaatctgcccagttggggtacagataaaccttttggttaccagactgttggggtttagatgtcaactctttataggaattgtctaggaaagtcagctgtccaggcttggagaccttaaggaagcatggaaagctgcagctccctttttccaggaaaaggcagtcacccgtcttcttggaagctgtatttcagggaggcctctccagatgggctgggggacactgccaactgttagcatattgtccagacgacccagcatgagctatctaggtcatgttcagacagtaccactcatggtgttctcttgcttaaatcattgttcctgagtagccttgaatagtaacaaatgtgatatcttgacatcatctggtggttgggtgacaactgtttaattttctaacacagttggtttctgcaatgccttttcccaagtaatttagtattgtcttatcctgctatgtcttccacaaagggaagatgataaaatctttttaattagcataatgtttgtctactttaattttacattaaaaatttgttatacttttattaaaatactttcacagtaaagttttaatccattttcctatggatttttcattttgtaatatttctttcccatttataatcatataacatatacatttaataaaagtatatacaatatatatcaagcatatatggtatatatactataattttgtctgttttctactttctttctacttatgtctattttctgtattttttccatatggacatcatttttcacatttaatgtcttcttaacattacagggcagttctaattgttagaaggcctccttatactgatggctagtttgactcattataaagtcagttattgttcttggttttatgtcttaacaaggcatcccctcctcgaaccttagaggaattgatatctgacttcacatgctctaggggatgccatgtaaaattttgtagaaatgtttagtattctggcatgtgtgtctctaactttgtcagatgattagagatctgtgattagttaacaaccacacaggactgaattagcttccttccgtaactaaaagaattgaacagattgagtaaattaagtggatgcctcattagctccacaaagtttattagaattagagtcaaaatctaatacagggctttggactactaatatctgctagctacctttgggatgatttcagtatcataggatcatctgaccaaacaagctgtctcaaattcctgttagagtgaaaccttggctggacattagcttcacctgggtaatattaaaatactgatacctggccccagcctggagagattttgattctattaaattgccagagttagggttcaaggcaaggtacatccagagttgacaaccactggatttgaagccaaaatgtatagaatgtgaaacaggtaagcactgttggaactaccgagatagagacaaacacattccaggcactagcctctgcttctgtcttttctgatgtaagaatatttcgcctctcagaaagttgcttcccaaatgaatacttttaaaaattaacctggttttttcagtacataagacagggtaaggagaaaaagttcacctggtttttaaaaacactattgtttaaactttaacagaattatcttctcaaaatacttagaaatggagtaaatgtttctgctttgataacactgaaaccaaagctagagagtacagttaaaagggccattaaaaacagtttttattctataaaaataaattaatcatcgaatattcattataaattcaatcatgaaggaaaatacacattaaattatttatactaagataaatataaacctctattggcaaacaacttcgtagttaatttttctaatttaccactttctgcatctcatgcaaattatgtcttcttgcattgccaataaaatatgagattggggaaggatgctgcaatatccatgagaaagtttcatgtaagtgcaagcaatcagatttcattgcagatccagagtagtaacactgacagaactatgtcagttaagctttctgcattatttttatgcgttgtcattttcttttggcagaggagagattgaggatttacctggtccagaaatcgttgtaggttaacaaggtaccaatctgggtttgtttttatccccttgcttaaccaatcgtacagttaattcccaaaatgtgttattttttaacatgcaaagcagttcaacaacgatagaaggtgtagggattccagccacagacagagcctgagagaacaaacaaagcagattcagaaagcaggcaagtagcgcctactttgtttcagtggtatgtcctctgcagttcaaaatccttcagtatctcttaattaattcatagactatttccagtgaggtttcactgagaattccttaatgtcaagagctctctctgtatcttaagcagttagtgtcattgaaatttacttatgcaatgattctttcaccaaatatgtattgaaggcttatgatgtgcaagacatgtcccaagttctggtaatacaatgatgaacaaaattaatagtttctttctacacagtttttggtttatcaaatttattacatgtttaataaatgttcattaagtgcataaatagtaaaagaatcaaagatgtgatttcagcactatgtatcaaaaccacagaatggctgagtgttctttttaaatccatgtatcatagtgtattagaaggcaaaataataagaaagcagatcagaagtcaatatggtccagtaacaagaataaggagtcagattagagtcacattaacggttcacattttcctagctgtgggactgtaggtcgttattttcttgtcttattttgtctttctgtttttctttctttcttttctttttctttttttttagacagagtttcactcttgttgcccaggctggaatgcaatggcacaaactcagctcactgcaaactccgtttcctgggttcaagcgattttcctgcctcagcctcccaaagtagctgggattacaagcgcccaccaccatgcccagccatttttattttgtatttttacttgagatggggtttcaccatgttggccaggctggtcttgagcttctgacctcaggtgatccacctgcctcggcctcccaaagtgctgggattacagacgtgaattctataggtctcatttgcaccatctgcaaatgtgaacaatggtattgtgttcatttacccattcagccaacttttcctgaacatctcttaagtatagggttcagagatatggtaggttgggtttcagatgaccaaaataaagtgaatattccaataaagtgagtcacacacattttggttttccagtacatacaaaagttatgtttacactatagtctattaagtattcaatagcatgtctagaagacaacgtgcataccttaattttaaaatattgccttgctaaaaagtgcttatgatcatctgagccttcagcaagtagtaatctttttgctggtgggaagtcttgccttgacgttgatggctactgattgatcagggtggcggttgctgaaggtcagagaagctgtagcaatttcttaaaaccaggcaacaataaagtttaccacatttattgacttttctcttcataaaagacttctctgcaacatgtaatatactgtttgataggattttaccgaatgtagaactttcaaaattggagacaatcctctgaaacccaactgctgctgtatcagctaagtttatataatattttaaatcttttattgtcatttcaacaatttttatagcatctttaccattagtagatttcatcttgagaaaccactttctttgctcatctataagaagtaactgctcatctctttgttgctgagattgcagcaattcagtcacatcttcaggctccacttccaatgcttgttctcttgctatttctaccatatctgcagttaattccttcacttgaacccttcaaagttatccatgagggttggaatcaacttttctcaaactcctggtaatgttgatattttgacctcctcccatgaatcatgaatgttcttaatggcatctagaatggtgactcctatccagatttttaattttctttatccatatacatcagaagaatcactgtagaaagtagccttcccaaatgtatttcttaaataataagacttgaaatactctttgaatcatggctgcagaaagaatgttgtgttaagcataaaaacaacatgaatcttgtgtattgtattagtctgttttcatgctgttgataaagaaatacccgagactgggaagaaaaagaggtttaatggactcagctccacatggctaggaaggactcacagtcatggcggagggcaaggaggagcaagtcacatcttacatggatggcagcaagcaaagagagagcttgtgcagggaaactcccatttttaaagccatcagatcttatgagactcatttactatcaggagaatagcacaggaaagagctgcccccataattgaatcacctcccactgggtttcccccacgacacatgggaattgttggagttataattcaggatgagatttggatggggacacagccaaaccatatcattccacccctggtacctcccaaatctcatatcctcacatttcaaaaccaatcatgcctccccaacagtctcccaaagtcttaactcatttcagcattatctcaaaagtccacagtcctacatctcatctgagacaaggggagtcccttctacctatgagcctgtaaaatcaaaagtaagttagttacttcctagatacaatgggggtacaggcattgggtaaataccattccaaatggaagaaattggccaaaacaaaggggccataggccccatgcaagtccaaaatccagcagggcagtcaaatcttaaagctccaaaatgatctcctttaactccatgtctcacatttgggtcatgttaacgcaaagggtgggttcccatggtcttgggcggctccacccctgtggctctgcagggtgcagcctccttcctggctgttttcacaggctggtgttgagtgtctgctgcttttccacacatggcgcaaactgtcagtggacctaccattctggcatctggaggatggtagccctcttctaacagctccactagacagtgccctagtagggactctgtgtgggggctccaaccccacatttcccttccacagtgccatagcagaggttctccatgagggccctgccactgcagcaaacttttgcctgagcatcctggcatttccatacatcctatgaaatctaggcagaggttcccaaacctcaattcttgacttctgtgcacctgcaggctcaacaccacatggaagttgccaagcttggggtttgcaccctctgaatccatggcctgagctgtaccttggccacttttagtcacagctgaagtggctgggacacagggcaccaagtccctagcctgtacacagcatggtgaccctgggcctgacccatgaaaccatttttttcctcctaggcctccaggcctgtgatgagaggggctgccatgaagacctcagacatgctctggagacattttcctcgttgtcttggggttaacaattggttccccgttacttgtgcagatttctgcagctggcttgaatttctccacagaaaatgggattttcttttctatcgcattgtcaggctgcaaattttccaaacttttgtgctctgcttcccttataaaactgaatgcctttaacggcacccaagtcacctcttgaatgctttgctgcttagaaatttcttccaccaaataccctaagtcacctccctcaagttcaaagttccacagatctctagggcaggggtaaaatgccagcagtctgtttgctaaaacataacaagagtcacttttgctccagttcccaaaaagttcctcatctccatctgagaccacctcagcctggaccttattgttcatatcactgtcagcatttttgtcaaagccactcaacatgtctctaggaagtttcaaactttcccacattttcctgtcttcttctaagccctcctaactgttccaacctctgcctgttatccagttccaaagtcacttccacactttcaggtatcttttcggcactgcaccactctactggtaccagtttactctattagtctgttttcatgctcctgataaagacatacctgagactggggagaaaaagaggtttaataggcttacaattccacagggctggggaggcctcacaatcatggcggaaggctaggaggagcaagtcacgtcttacatggatggcggcaggcaaagagagagcttatgcagggaaacttctgtttttaaaaccatcagattttgtaagactcatttactatcatgagaatgctgcaggaaagacctgtcccccataattcaatcacctcctaccaggtttctcccacgacatgtgggaattgtgggagttacaatcaagatgagatttgggtggcgacacagccaaaccatatcatgtatccatcagaactcttggatgaccaggtgcactgtcaatgagcagtaatatatttttaaaaatctttatataagagcagtagttctcaacagtgtgcttaaaatatctagtaaatcatgctgtcaacagatgtgctgccatctaggctttgctgtttcaggcacaagcacaggcagaatagatttggtgtaattctgaatggccccaggattattagactggtaaatgaacattggcttcaacttaaagccctcagctgcattagcccctaacaagaggatcagcctgtcttttgaatctttgaagccaaacattgacttattctttctagttgtgaaagtgctaaatggcatcttcttccaataaaagtttgttttgtctacatttgaaatttgttgtttaatgtagtttcaatgatcttctggataacttcctatagctttgatatcagcacttgctgcttcactttgcatttttgtgttgtggagatggcattttccttaaacctcatgagacagtctctgctggcttcaaccttttcttctgcagcttcctcatctctatcaatctttatagaattgaagagagttaaggccttgttctgaattaggcttttcttaagggaatgttgtggctggtttgatcttctatccagactactcaaactttctccacttcagcaacaaggctgtttcaatttcttatcatttgtattcactggagtagcactttttatttccttcaagaatattacttttgcattcacaacttggctgtttggtacaagaggcctagctttctgtctgtcttgacttttgacatgccttactaagcaagcttaatcttttctagctttttatttaaagtaagagatgtgctgctcttcacctcacttgaacacttagaggtcattgtattaattgacctaatctcaatattgctgtgtctcagggatggggaggactgaggagaaagagagagatagggaatggccagttggtggagcagtcagaacacccattaattgagtttgccatcttatataggcatggcttatggtactcctaaacaattacaatagtaacatcaacaatcagcaattacagatcaccataataggtattaaaataattttaaaagtttgaaatattgcaagaattatcaaaatgtgatacagagacatgaagtgagcacatgctgttagaaaaatggtacccatagacttgctctacacaaggttgccacaaaccattttgttaaaaaaaaaaaaaaagccatctctgcaaagcacaacaaaacaaagcacaataaaatgagatatgcctgtttcagtcactttgctatttaaaagagaaaatctgttaagccatagtccttgtcctcatgattcttacagtttggactggaagaaaatctttaggagtaaagacattaaatgtgatgaatgtttttgtgttggccttttacctatttattctcagaccacatattgccctttctctgccctttatagttggaggctacgctctgaaggctgtggtctcaagacttccatgtcctttgttagatagatgtagcacattggaggcactggtggacatttggggagaggcagaaagagagaagccagagtgttttactctctctacctgaggcagcacctcaggcagtagctgtgtctcctccatggcttcacccttagctaggtgaccctaatccttgcatacatcagccctcctttttagctctagtccaggggcggtagttgcttcctgttgtttctaacccctaagttgcctcacagtcccctatttggcatttcaactcttccatcaccagtgcaatgaatcagatctattaaatacactacttttaaaatgcatagagtgtttcttttagcttagtcggaagctgtttgataaagccttgataggagtggcagaggcggatcttatgttagaagtagtcaatgaaggtttactgagaaagtaaaatttaggctaaaacctcaagtgtgaatataaatgtatcaatggagaggggaagaatattctagatcagaagtgtccaatcttctgtcttccctgggccacaatggaagaattgtcttgggctacacagaaaatacactaacaatagctgatgaactaaaaaaaagaatcacaaacaaaaaatctcaatgttttaagaaagtttaccagtttgtgttgggccacattcaaggccgtcctgggcctcatggattggacaaggtttttctagatcatgtgcaatgggaaggaaaatgaggcatattttagaaactaaagatgtagacaactggaatgtgacatacaagagaaagaaggtcaagaatgtttgagggctgtcaagctcattggaagacattacagtggaatgacatgggcatttgtgttttttaaagtcagtggctgcattgtatagaattacttgggatgcaagcagggaaccatttagaagattattacagacagcggtgttggtatggagcagaatgatagcagaggcaatggaggaaagtgagcttatctgagagatagaggtaggaggtggagtctgcatgtcttggtaattgagagactctgtgaaacaagattgaggaaagggttaggattattttcaggattcaaaacagagcaactgggtagctgaggttctaatcacagtgagaaggaatattggagaaggaagagttccatggttgaacttcaggtatatgtcggttatccccagggagagctgtccaggagtcaggtgcgctgtatgtgtctggagctcaggaggcagatgcagaccaaagaaattgatggggagctatccatctacagatggtcatagaagttatttgagtcaataaaatcaactaaagggggtgcaagattaggagaacaagagagtcctgtctcaagcctaagaactgccaatatttgaagacaaagctgaaatgaaagacatgaacagagacttaagaagaaaaccaagaaagttaggtgctatggaagccaaaggaaaggagtgtttcagaaaggagggagtggccaatagcttcagaaatgttcattggtttagtgaaacacaagtcagttggtgacccaatgggagaaatttccatatagtaggagcataaaccagattgaagtgggttgaggtgtaagtacaaagggagaatcaagatagtgaatataaacaaaattatttcaagaaattatgctcagagtgaggaggaggtaagaagtatctggatagggaagtaggaattgagagggatcttattttgtacagtgaaaaataagtgcttatggaaaagatttggtaaagaggaggaaaagagtaagggaaaaatggatgaagctgcgtatcagagaatgtgagaaggacaaagaaccaaagcacaggtggaaggatttgcccgagttggtaacaggagggaaaatggaaatgatgactgtgggagtagatgtgtttgtcattttgatggctggacatggagaatgttcctttttgatggttactattttctctttgagtaggaatatcatctgctgtgtgtgggaagtggggactcaagtatttgagaagaaagaagaaggacgtttgctgtagtctttgcagaaaatgaaagtgatttgattaatagttgttagaatttaaaaatgtgtgcacagtgtttgggttaaagttgtttttaaaaaaccagccaccttgccttttattctttatgctgtgaaacctctttagagcactcagtcaccttttggccactagatggacacagtgtactcagtgctaaactgctgacccaccaggttccttttgttaccagccaatactgacagagtgattgagttgtgaacttattgttatgaattgaaacttattttagagaaaaaatcttaaataacacattccatcttacttatagttcataggtcagagaaagactgtggtgctacaaaaacattagccaatatattatttgctttcacgctaagtgtaatgtgtgtaacatgctatctctttgaaattttttgccttaaaaatgctaatcagttggcacaaggcgatcatttacatagtcagaatagagcttttggtttagcattttatcttaaaataaggcagaaatggcattgctctggatgtcagtatggtgcattataacccaagtggtggaaaaataactgctaaatggcaaacacatagaaactgaattctgctagtcagcttccatttggtagagatatgtgtgcccttgggtagctgcaatgttagctattattaatagttcaaatctttgcttcataaaagttctgcatatagtgttgtacaaattgaagtgattcaaggaaatcatagttctgtggagcttcctccctgttttgtagtggagattgggaatgggggtggaccataaagtaggtggttttttttttcctgccactcttaactaattacacaccctgccatatcccccaccaacataagacttcagactgagaaaacctacataatttaaccaatgttagaatataggcatttttaacgtgctgaaaacagtgttgttcttttggttcctaaactaaaatcatttgatacatttctctgtcctatgaaggaagccatgaatgctatgagtaaagatatttgtggcaggtaagaagagggagttaagtaagggagtttaatatgaaaaattcatataaaggctccaaggttaaataaggaatacttttgcacaatgggttcaaggttttactgggtagagcatttttaaagttttataacgacgttagaaggaatcgatttgggagaaaaactatatctgcttaatgtgagggagcactgtggaaaatttccagcacaaacttttcctgggcctcaacatttcttggtaatgaacctagatttggagtgatcaaataatttgctgtctcaagtagtaaaagggggactattactaacttcacaagaagacaggcataaacccagcaacatgtacaaagcaggatgatctcaggtaactcaggaagatgctggaacactctgggtgaagggcattaatgctgttcacagtggaacacaggactgctaatggtatttttatgcttttatgcatcaaaagcattgttctttgatttgtaatctctcacatatgtgaagcagggcctttcaatctggatttggggtcagaagacaacatgtggatgggaggcagaaaattataacagactcacctggggagcagttttttgttgttgttgatattccctagctgctgggaatggtggctcactcctgtaatcccagtgctttgggaggccaaggcgggaggatcacttgagcccagaagttcaagactagcctaggcaacttagcaagaccccatctctacaaaatttaaaaaaatattagctgggcatggtggcatacacctgtagtatcagctactcaggaggctgaaatgggaggatcgtgtgagtcctgaagtcaaggttgcagcgattgtgccactgcactctagcctggatgtccttccacctcccccgccaaaaagggatattccaaaactacaacattctactacattattctacattcttcctttttactctccatattgatacagaaacaaaacaaaacacatttgagacttaccactgcaaaagagtgttctttgaattgtggctgcaattatttctgttgcaaactttagtgtattattgttataatgatacttgaagtaatacccagatgtattgaaaattcaaaagacttcattgccagctcaacctgcactctcaagcactgcttactaagggagtaacaatgggaagagacaggtgtgagaacagaccccagagccagggaaatgaacatggagaagggaaataggcaaaatctcctcatcagtgtggttgagggaatattggggcatggcatggagagtcccacctcacttggcagccagagaatcttaaagcttattgtcaaaaaccttatgaaaggttagagaaggtaccattttattttacaaaatactttagcctttaccagctcaacatccgtgtgtcagcctgctttgaataaagaaatacacgtcttcttaaaatctgcccctgactacgatgagcttctttgtttcagcttattttgactaattaggctgaggttacaaaccaccctgatatttcagttgctacagccacagtcttatttcttgctctcattacttgttcttggctggatgatattgatatgttcgttttgttctggaaccaaccctaaatgagctgcccatcctgagaaggcagaagaaattgggagatggcaggggcacacagtgattttttaaaacttctgtttagaaatgccacagatctcttccatgcacatgccattggccaaagtgggttgcaagatcagcttggtgtcagtggggcaggaagtataatcctggcacaataatgggcttggaaagctgttaaacatttttacaataacacaatcagattctttcaaattaattacaaaagtacttaaagttttttacatacattctgtgcactgtcccaaagctatatctaatgttacttcctcattccgatgaattactattccttttcttcttagctgtgtttaaaagcccatacatctatcctgtgataatttgtacactgtattgtgcttggtttacttgtctctctccttccctcagtggtgggcccttggagggcaggagcaatgtgatattcatccatgagacccaagtgtgtgattggtgcacaatggacaccctaaaaagtgtttattgataattaatgaattaatagctaaatgagggagtgttttctttaccttccctacactcaccttttctccattccagcaagcaatcttgcacatggagtagaaatcacagtggaatcttgaagaataactagaaggttaccagatgagaaagtacagggaggtaaatcagggaagaacagctgatagattcagttgtagccatgttgagtgaaggtaagattcttggattttgcttcatgaactcgaaagtctacataacatcaatcttggccactgccaagtctgacccatctcacagcaccagaggattggggtagtaaactgcagatgtagcacccacaggctgaccagtctgaccctcattaggttccccaaaaatcaaatctctaatgcacctgcatggatgctgcaaaggaatgtgcactaaaggaatgtgaaagcgataactatttttcattatttctgatgagacattttagcaattatgttaaaatctgcacaaccaaaaagtctaaacagagcgtgaacctctgacattgactctggaaattacacacattttgttttactattttaaaaacacacatgaaccgaagagaaaagaggcagaaagactggctagaacacagcagaacttacccattaatgtaatggagtttgagcctttctcaatgatgcctgtggggagctccgtactagtaatatctcaaggatattgccattgttcaaacatttcagggattcccctcttgaacttaccttcaaaagagcctttgctacatgtttttgaaattcattgatgacaaatctccatctgttgaaggtttatctagttctatgaagctgccaaaagtcctttggcattaagcctgatgattaaagttgatgatccagttagcgaatgctattttgagtcaaaatgagaagtaactataaaattaagaggcagttttcttatgcacactggaagtgccctgtaatgataattcccaaagagaatgtcaaaaatgtctttaatcctaatagaattcactatatttttttcattgaaataaatatttaggaaacattggtttgaatttgcatatggtatacatgtttgaagaatcactcttgttactatataggtaacacttataagtgttaaaattatcaagttacttaagtacttataatgaatataaataaaatgatccattgatatttgtctatatatttttatacataaaagattgtatatgttatataatatatgtgtatacatatagcacaatgaccaaattaaattgtctttgcagctatttttaattaaaacattttcacattacgctttcttaaacaattgcctctgttatatcagaagccaaaactggcaaattatattagctcagttatttagttactggggactctatctttaaaccaaccatgggaattcatttatagctactcaacactcaggtatgtatgaccatggggcagacaaaagactgctttaaaaatcactgatgtgtatcatgctttttcttcttctttagtatttctagccatcaaaaagaaattatattgtgaggcagatggcagtaatatatttttcaaaagtgaattatatcctgtttccccatataggtaggtaaataaataaataaataaattctatataagcaacatgacataattcccagactatgaatttctgctaatctgaagcatttgattaagactggatttaaactatgcttacaagttgccggaaactactcaaaaaggctacattctgttaactgtgttatttttgtctgtattatgtcaaataattttgactaaatcattggtattatcaaggtcatgtagaagtcttcttaaattctgattaaataatcgactttctttacaactacagacaaattgcaacagaatctgtattttcaggcagttcagcctgcatagggtcaatttaataccatataaatgttgggaacagaattatcagaaacttcagatatgtcaccataagccagatgaacaatatatgtcagtaccattgggggagtatttgccagcataaactggatatgtttcttgaatgcatgaaaaatgtggtactgaatgattcttccttcactaaaattgacttatttatcttgatttaaatataggcatacattggtaaataaaacctaggttttttcataatatattagagaatttttgatacataacaaatgaggtaattccagatcgattggaattcaggtttagtgcttcgtaaagagttgaaaatagttcctggtaggtaagtaaattgtggtgggaaggacaggacattctctaaaagtgcttggttttagagatgttttggttaagagtttgaccaggtggtagcagatttactttttcctaactcagttttacttgaaaggccttcagattaaatacttacagaaccaggaagaaatgtatctgagttacagaacttgaatggggattgtcaaactggagaatgcttgccccatctgaaggagatagctggcaatatgtagggaggggaactctaggtatttttgtttgtttgtttgtttgtttttgaggcggactctcgctgtcacccaggctggagtgcagtggggcgatctcggctcactgcaagctccgcctcccaggttcatgccattctcctgcctcagcctccggagtagctgggactacaggcacctgacatcacgcccggctaattttttgtgtttttagtagagacggggtttcaccgtgttagccaggatggtctcgttctcctgacctcgtgatccgcccgcctcggcctcccaaagtgctgagattacaggcgtgagccaccgcgcccgactgggaactgaaggttttaaacctcctaaacattcaaaagaagcccaaatctcaactttaatgtgacattttctgtgtgctttaaatgttggatcaaaaggaaaaacaaaattaaaaatatgttggacaaactcaggcctgctgtccatatttgatccaaggaggaccaatttacccactctatcctacacctttcaggtcatagcattttcctttgttatctttcggcattaatgtcatattccaatttttccatatctatgagcaaggcccaaggtctgtagccaagcccagggtttgcatgtgatatctttagaaaaaccccagagaagctttctcttgttttctcactatgctgtaagtatgaatagcccaaagcaaaaaagacaagtaccctgactatcatgatcttctaagtattcatggagctcgctaaaattatagttccctgtgaagagcgtgtcgttgcagaaaagcactggagagtgggcttagataccttcctgtttgatctcaatagtttaatgtttactagctcactgagaagagactgccaccttagtgttaccctcttgtaccaccctaaacaagtcatttatttctcttgttttctctctttaaaaaaatttccatatgaaattctgtgattttttttcccctcattacctattttctatcatcattgtatccaaaaggtcaagagagagaaaaggccacttctccattgactggttatctcttagactgtatgacagcaaaaatataagcaagggttaaatttcaaatgcatccactctgctcatacacatttgtgatttaaaaaacacacttcattgaataatttaaaatatggttgtaccatctgttcttgtggggattaacattgttcatgatggcaaaataatcacgttaaataaattctagatactgcactcttattattaataatagcaatgatattgttagttcagatgacccggccttttctgtctccatataatcacactattgattttccagtattggaaaggagaacgagagagtacatgcttttatttctaaatggaacatgctgttcaggaattctgccatttcttttatggaaataaaaaataaagtgcaaacatatgccatctttgaaggtaacattatgtaagcctttgagtataacatttgctgtctttatctatttctttgtgtctattcataagaaaaatgatcagattgtcaaattcatattctagaaactacgcaatcaattttttttcaggcattctgtcgtctgcctggaatgagattagcaaaagagtcgttgtgtaaactgaattagtttacttcatgcgagcattgattttacattccctgaactcttataacattttatgtttgagccacacagtaggtactatctcacattgactgagaatttattgtgtttaagtcatttcttctaaaaagtattgtaagctttgtgaggacaggggccattttatttttctcttgtatctgttgaaatttcccactctgctgggtttttctaaggtcaaaataaattagaattaagtgattgactttttaatgttgtatagtggtgggaaaaggttaaaaagagttgcttttcgtagcaagatggtatgggccaatgacttctaccaacacctaattcggtgatataaatgatatactcttagcttgggcttttcctctgtgaacttctatggcaattgggtgtggacaaatgggtccttgaagatattttgaaaatttccccaacaagaacccagtgcttaatgaccctctactgccaggtaaccttcctaggttgctgcacctattccctctgcttttctttaaaatcacatacttttatatttcctaagagaaggtagaatgtaataggcatcattaatttttgcagaaagtctccaaaacatgttgttaaatcaccgctgtcttcttacctccaggcaaaaaggtaccaacttatttaaatatttgttcactcacattatgtgctcctgtgaattttctctgggtgtcactcttcacagtgagtatgagctctcatttaatctctttcaagggaaaatgagctcaaagaccctgatgttgcaacttgacctccttgagtttgtattaagctgttaacttgctgatttgtccctagtttatctattatgaaaacttggatgttgtcaaaccacattttcattccccagtctgtgttcactatttgatgttccccacaagttacactgccttggtctcaactaaattggttttctatattacaaagtcaatttaatatctgaatgatcttccaagatactgcctataatttcttttacttctctctcacaaagccttatctttcattaataaaaaatggtcccaaagcccattgttatcatttgcatttcccactttacacaaaactagccataatctcactatcacttgtctggtaactcaggaatatgctgtataaatagtgtattttttattttggtaaaatatttgcaaaagtatcttgtggtagctataatggatgtgtgaattggataaaaatactattaagtgtgttttttcctagttgaacaacatagataaagaatactgagtaaagactaaatatttgcctggatggaagaccgttcatccaatcaaacaaatatacagaaacataaagagatagtaaatacactggaatgcaaagtcagagtcaatagttatttaagcttgctaataaaaatgactgcaatttcaagtgcacagttaattagaattggatggtagaggcccaagggtgatggcatgtaaatgaagaatatgtgaggaattctgtcttaagccttattcatagatgtacagcagagaaattaagctgactgacattctgtgccctgcaatcgtcatatcacacctggggtgtgggattcatttcagataccacaggttaagaggaaatcaacaaggagcaatcagtccagaagggtgttgccaggatggtgaagcatctgggaatcatgatgtcttcggaactgccaaaagaaccgagactgatgtggcctggaaaagggagagaataaaaactcctgtttagataatctgaggttttcatattaaaaagattcagggccaggtgcagtggctcacgcctgtaatcgcagcactttgggaggccaaggcaggtgtatcgctggagtccaggagttcaggaccagcctgggcaacatggtgaatcactgtctctcctaaaaatttttaaaaaattagcttgtgcagtggcccatacctgtaattccagctactcaggaggctgagctgggaggattgctggagcccaggctgtggaggctgcaatgagccgagatcacactactgcacttctgcctgggtgacagagtgagaccctgcttctaaataaataaataagactcaggcttgtttttgaatgactatgatcaaagaatagcacttttagaaaggtgaaatttagtttgatacaaagaacttttcaatatttaaatcttcaaacttttcaatatttaaattttcgatatttaaatctgctcaaagataagcatttaaatctgctcaaagataagcataccatgaagcagggctcctcatgccagaaccagatatttgtttttccttcaaggctgttcatgcattaggggaagactgaatttcccatggcttctaatgaaccttttaactatgaggatctgttacatgaaaattttttttttcaagatggagtttcgcatttgttgcccaggctggagtgcagtggtgcaacctcggctcaccacaacctccgcctcccaggttcaagcaattctcctgcctcagcctcctgaatagctggcattagaggcatacaccactatgcacagctaattttgtattttcagtagagatggggtttccccatgttggtcaggatggtcttgaactcccaacctcagatgatctgcccgcctcagcctccccaagtgctgggattataggtgtgagccaccgcgaccagtgttacatgaaaaattcttagaatagtgcttgatggcaccaagtaaatgttcaatagatattagttgtaattgttatcagtagtgactattctatgcatttgtaactgattattttttggatgggaataagtaaaggtgtttaaaatgttagcaccggtttctgttgctaaataattaaggtagttagtaaggtcttaggctacttgtaactaatttactcttaatttgtcaccactttatgttttccattattgcctttacattctatgttacctagatttgggattaattcatcaaatttaatatgaaaactttaagtgactgctaaatcacaattgcatatattaaattatctagtgataacgtagcaatagtctatcaagaaaggaatgaatcatgaccgaaaaaatgaatctctttcattaattaagagagatgtttcagtttagaaacttacagaatcttaatggttaagctctaggtgacgttagcttcattggattattttctcaggtgacagatttgctacatcttaggatggcagctaatatctattgaaggtattcattcattcactcacttcctaatttatttaacaagcagtgtaccaaccactgcccatgcctgcacctagctgcttacctctacagagtgttttctacccttttatccctttttgagtcagtcatcacaggaagaccagcctctcagtcatcctatgtcccctatatcccaaccccaagggctccatggcagcaaagcagtccctcttctcaccccatccctgaactccttgggctccttccctgctgtattttcctctgtatcagttatcatttctcttatatattttacttactatgtccatttacctatctctactggaatgtcagctccataaaggcaggaatatttgcatgtgttctatttgctactgggtacccagagcctagaatagtaacttgataaatatttgttgaatgagtgaataaggcctaagtgtcatggaaactgataccagaaaggtgttatttcttccccagggttaccgaagccatttatggcagcgcagcattgtgacccaaagtcacttggctctgaaaccaacatccccattcttttttttttttttttttttgacagagtcttgctctgtcacccaggttggagtgcagtggcacgatcttcactcactgcaacctctggctcccagggttcaagcaattctcctgcctcagcctccgaggtagctgggattacaggtgtgtgccaccatgcacagctaatttttgtatttttggtagagacgaggtttcaccatggtggtcaagctggtctcgaattcctgacctcaagtaatccacccacgtcggcttcccaaagtgctgggattacagatgtgagccactgcacccagccccaacatattcattcttgatctctccctgcaagcaaataactttgaaattatgctgaataaactcagggatctagagatatttgacaatgacaatgatatttcactgctgtatggatttaaatacaaggagacaacttttgtatcatttacatttaggagaacattcaggtcaatatttgcctgcctaatttatctccatgtggatcacttttgtttcttttctagatgtattcaatctgatttagtttattatgagtttctctattatttgtttttttttccttggatcattgatgcagaccctagaagaggtggagtacagaaatagatttggagaagcaataatgagtaagcctcagtctttgcctctgagatgcattcagaagtggttgaggcaacattgtaagtgtgcagttccagagccagaagataaccagataatttataatccaagcaataatattgcaaaagtaaaaggaggcactatttaatcatcattccagggcaatagctgtatactattcagacaaactgaagagtaaagtcccctagtttaaaaactcgacaaacgtaaaatatgcttgcacatctttttagtaataaatatttaccttgcatctactattttcagagacacatactaggcactgtagcaatatatatagaacagtgtacagggcactgtggtgaatttaaagacaagtcatatatcttcctatcttgtggttcagaattcactttaggacagagaacattaaaaatacaataaaaagcagtaaatgatggtgcaagctgaattaagcttgatgtgatgttagccagccacaaggtttccaacagaattactgatatgatttggctgtgtacccacccatatctcatcttgaatcctagttcccattgaattatagttcatttctataattcctatagttccaattttatagttcagccaacaatccccatgtgttgtgggagggacccggtgggaggtaactgaatcataggagcagtttcccccatgcagctgtcgtgatagtgagtttctcatgagatctgctggttttataagcttctagtgtttcccctgctggcactcattctctctcctgccaccctgtgaagaggtgccttctgccatgattgtaagtttcctgaggcttccccagccatgcaaaactgtgagtcaattaaacctcttttctttataaattacccagtctcaggcatttcttcatagcagcatgagaacagactaatacgctgatgctgtaccacttttatttctatctcataatattgtcaattgaaatcagtcctgtcttgatgcatgaattgcacatcaaatgaattgtatgctttttttttttcctagataggagttatgccatctacttcttgtgtgtatacatagtacatgctcaattaatgctggctggctggttggggtagaaaaatgaattgatagatttaaaaaagtcatctggcaaccaaatatagagccttgtttgccaaagacccctcctctttgctgaactagctagttgacagagtaagaacttgcagcatgattattttttatcttacaactttataatgatacatttggttatttggaaataagtttaaagtgttttaattctttccactggttcctactgttggaaattcttttgcagctgaatattggcaaccgtttgtatcttggcaagtagactatgctttttaaggatgaaagtgtgggaagtagtataggacatctgtcgaagaagtcatgttgtcaaagcctgttgtgtatattaaactcatttgtttccatttctatacattctaaagcaaaatgccactccatttaacattcaaacagcttataaagagcttggaaatatgaattgtgtgggcctacctgaaatttcaatgaatgagcatcattttattcagttggttttgttgctgctttagctcagcctaaactttggatatataataggtttgttgagataagattaccagtagctaagggcttttgttggatgggagaattgaaaccagcataatttccggtacctgttaaatggcacttggaccaggcctaatttactgtccttgtatttaacaaagcagaacaaacaaaacttacttagatacctgattcactaacttcctcttctaaggtatccgtccatgtggttttctcctttacttaagtaggtttaataaacttgcctttatgtgaccaacgggtttctgttgggttttggaggcaatgacagttaatagtaaaataatattttgagagaaaccgctctcaaagaggctccattagctggagaataaagcatttttaaaaagatgagaccttatgcttcattcatctcaaacttacctgcttataaaaacaaaacagttgattgatttgatcaaaagttatccttgttataaaattaagtgggcctgctgactagctgatttatgggattttatgttctttaacttcgaagaagacatacaattcagtctcaacagtttttacaatctgagagattaggtcatgctaataaaatttctgagaaactacttatccatctgaatgttaacatcttttactagaatagtatgtttgtttcagttgatgaagacttttgtttggatgtaagctttcaactcatttagataaataccaaggaagtttttcaatatcattattttaatggattcatgatattcacattgattggctattccttattttaagtagttgggcattaaagatatttacatctttttattattttgtaagacactgtgatgaccttcatgatagttaaatcttcatttgcactgttatttccttctgactgtagccattgtgtgtaagactgcaaagtgtaatatatgcagtgtttaagagtagattaacaagaaaagctaatgtatgaacataagtagctgacccttaatagaagagtgtttaattaattttgaatttgccagtacactctcaaaacacagagcttgattaaataatggcattatactgagcttattcaagtatttggataacttttctttactgaactgaaactgatagcccaggcaggcacatctccaacacctctaattaaaatccacattcatcccttgcttcctgagaaaagatgttgctctcatgttcctttgggcactctttgcaaagtatttctgtttgattgcatatgatgaatagctccactacttccaatgtatttcagttgtcaaatatttataattattattcttgggaaagtaactgagaagggagttcaggaaagacttggacagttctttggagcatcaggaccttacaatttcagctatcttgttcaataagcaaatgttgttttaggttcctggattacaaggtcaaagaaggcagaattcctgccctcaagaaaagtcatggggaagagttgtaaatgcatgaacagctatgaaacagtgtggtaaagtcatgtgagttggcaaaatagatgagaggcttctaagtaaaactgaggaatgaagaatgttttttggaagagattacgcttaaaaggaattagccagccagagaagaaagagaaaaatgttcttgccagagtacctatcatttgggaagccccagtgggccagaagaacagactgtgtacaggaaagacactaccaagtgttatttgtggctgatacaggagaggaagggagagcaaaacaatagagcatctctgtgctgagtattggaatttaaattttgaacttcattactaaataatgtggaactattggataatttcaagcaaaggactcacatgttcatgtccttgcatgagtttgctaagatttccattttaagataatcttggtaggtaagtgaaggatagatttgaggaggaaaaaatggaaatattaactctaggcaaaacatagggggaaagataattgagagagattaaagaatgtgtagagaggtagaagatatagtctggtctctggaatcagatgaattggttcctaactctgactccaccacttaacactctatgtgaccttgggtatatatcttatccctcagtgtcttgtttttctcatctgaaaaatgagtataataatagggcccaactcatattttatgagaattagtcaacctgccaaccacagtgcctagcacattgaatgcatctgatcagtgttagctattatctattgactattaatattattgttactatcaatagtattcatgtctctagggtttgtgacctgattagcagttattgtctggttattggctgaatggtggccagtactagggaatataagaagaaatgtggggagagggagtggaggaggggaggaacacagttgatttgaattacattataaatgctcaaatgaactagctatggaacttacaagtggaattttctcatgtgcagctgatggtaacagcagaaaaatgtgaactctgaataaagaggtgggagtttttcagcacataaagaatatttaaagccaattcattggatgcattgaccagtaagtgtagagatcaaaatcaagaacaactccaagaattgagagcagatgcaaaccccaatttttgtgggtctccagtccaggtatgagcagaaaacacgagggttggggagggaaggagtcttccaagccataagccaggggaaatcgttcagtcaattcttatgctctgatgtggtcattaacagatgataacctcatcctaaagatgagacttctttaggaacatcctaaagatgagacttctttaggaacatcctaaagatgagacttctttaggaacatcctaaagatgagacttctttaggaacatcctaaagatgagacttctttaggaacatcctaaagatgagacttctttaggaacatcctaaagatgagacttctttaggaacatcctaaagatgagacttctttaggaacatcctaaagatgagacttctttaggaacatcctaaagatgagacttctttaggaacatcctaaagatgagacttctttaggaacatcctaaagaagttcctccagcatttaaaattgctaaacgtaggccagggtagagttaaaggctgaaagaaccttaattaatatgtattattccagttattagaagaaaagtcctatggattgaaattgctgcttgctggcaattacttttaattgctgtgcagggcattattaacgttgcaacgtctagcatagtgatgaaaattgatgttccagatgctttcatgtgagttctccttttcttttaatgttctcaagagcatagaatcatggggatgataagtgagatttttgctagactctatacctgtcttccatagaaatcccagtatgcaaaaacaaacaaaacatagatgggtaatcatggccattccttaataagatttgagccttatttggaggtaggcctggtatggatggtagctctaatctttagatgaaattaaactctccaatgtgttcttattttcctaaagatcaagtccccaactacctctctccagccccagagaaagggaattgttgacgatagaaagattccattttcttcccttaagggccacctcctgctagttggccagagttctcacagactctgaattcttggcaggctggagtttaacagtaatcctctctcatccaaatttaagtacaggtaatccccaggagcccctgccaggcttttggtaaataattacctgggtacaagcaaaaatgcccctgctaagaaaactctggaattttacccatcataggacacataggtctctaccatagaggtttatatcttattcttcaatttctgattgttacccctcctaggaaattcttatgtgaagcaaatcttattctcttctactgggcaatctcctaaattagctggcatgtgaaaatgcttcattgagcttttgttcttcagactctcaaatgaaggagtatgtccaaagagcctctttatgcaaaatctacaaattacaccccagtcatacatcacaattagttggcagtcattaggcattacatccatattgtaaaattagtgatgtttctcccaaattatgaaatattattcccattaagaaaaatatactgaagagtaaaaacataacagaatttttgctatatttattctcttcataattatgcaaattaataaaaattatttactatttactaactttgcattgagtgttctctcattctgatgagactccagacttctgccttttgtacacctgtgcaaagcctttctaagctgtttatttatgtcccaatatatatttcagttcagaaaggctgttcttacttttgcgacaccttaatagtagttttatttcatcaaggaactgtatgcaatcactggatatttcagagagctgcctaccttattttcatactataaagaaataaacttgaataacaatggatagtcttggcaggagtgtggaggagttgacatcttccaacatgactgtgggaatatgaactgccatagcctattaaagggaaaaatgttcacaatttgtaagctagcaatccattttcagaaatacaagcaccaatcagtaagaatatattagcaaatgtgtttattgtttatatgagtccaaaattatatgtccgtcaataaaggactcattgaataaataatggtacatttatgccatggaatcttatataactattgaaaagaactcactaggtctctgtgcattcacaaaaataattttttcatgattgacttaatattaataaaggattatacatagtatgagcccactttattcaaaaaggaaggagaatccctatacatgtgtgagggtttgtgtattgtgtgtggtatatttatatttgtataaataaaaagtttgctgtcttttccctcccattaatcctaccaaggaagggaaaagacagcaatcttttttatcttcacatttctgtgtcatttggcatgttaaaaaaatagcatgtataattttgtaattgaaacctaaaatataagaaagaaaattattgaatagaaatggtaaatactatgcagccataaaaaagaatgagagcgtgtcttttgcagggacatggatggaactggaggctattatccttagcaaactaacacaagaacagaaaaccaaatgccacatgatctcacttacaagtgggagataaatgatgagaactcatgaacacaaggaaggacacagaccctggggtctacttgagggtgaaggtgggaggagggagagaagcagaaaaggtaactattgggtactgggtttaatatctggatgatgaaataatctgtacaacaaacccccatggcacaagtttacctatgtaacaaaccttcacatctacccccaaacctaaaatacaagatttaaaaaaaaggaaaattatctactctttcaaacttaaaatttctggattttaacagtgtctgctgtttaaacccaaacagtgtctgaatttggctactgaagaataaaatgtagccctttttcagcacactgtatgtttacccaggtcccaggatgcttaaataaactggcgtgtctattcaaatcctggataagaaataatttttcaaaataaaaattatctcacagaatactctgaacacctgctactctcattaccctgaacacttgtggttttgttgctataactctagcaaatggcataaaggctagaaaaactgtgggataaagatacagcatttctctaagaccctgctgccttcagtagaattatttaatatcctttctaatttctccaacttatttttcactgttatgaaaaaacagcttacaaagaattagtaacattcactatcaatgattccatagatcttcgttcaaagtgcaggtagaaggtgcatttctcaaagagtgttttaaacgaggaaaaaaaatgtgtatcatcatcaacgttttagtgaataaagacattgcttaccgtttttatgttcctgagaggctaagttcagttctatcatgaatagtaatttatgaataagaacccacaatttttttaccagagaattggaaaaccgcccataacatttccatatacccatctcattttctaagtatctataacagtttagtgaacaatattccctcttcgaaaatatagcaaataattatttccttcctatcagatatgcatgctttgtttacaggtaaataactctgattaccaaactactattacattaggttgatgttcttttcaacgttagacaaaaatggataaaaccttgctgcctactcagagatttggtctgagtggaaataggcttttgtggagctacagaatttctgctttatctactcagccaataattggtcagagcatgagcctggttagaaataagcaaaaagcttcttgtatccatgaacagaatgaacagaaaacaaggtagtacatttagcctccgagaaacacgcgtttacttttgaagcaaagaagcaccgggcaaccagtgagcagcatatgtctgaaatctattatctgacatgttctttccagccttcccaggaatgctggtctgactactcagatttgcttttacttcttgccttttggatataatgagtttgccaagcagctgtgagtacctgactctggggaaggtggctagattccgaagcgcttatgttcatggatcaccatacgcgatcaacatgccaattgatattaagccacagaggagacggtaactgctttcctttcctctagttgtttgtcagtgaaaatgtgttttgttgccctttggtaactgctttggatgtctgctgaaatgggagggtcagggtgagaagttagtttttattcaacacactggatagttgggaaaaaaattaaccagagaggaaagctggaaatagtttagctatttagcaaaagctgatctggtttcaaggtctgtagattttaagaatttgagagattgtcagtgcttgtattgccatcaaaatcacccatgatgagaatttgaaagaggatttagccaaataatggatatatttattgatggctatatggctgtttataccagatgcccagtaactcataatctacatgtgacattccttaatgcatcataacacattaatgcaataaatgagttataattctacaaaaacatttgttttcctgtagttgctagggagggaagaacaaggttatgtatttttcctataaaaaagttgtcattttagatctgtgttctacccccgacccaccctttttatgtagtatcagaatagcgatgatatagttaactaatatgtccaaaagtcacccctcaattttggttttatacaacgtcattttcttcagcaattaacaatgaacttcagaagcatttataaagatgttccattctctctgtgaaaattccatttctccctaattttatgaatccacataatgaaaatccaaaattctaaaagcaatgtattttacttggaaactgtcattactatcttactcttctacttttctttttctaattatatctacacaaactcacaaagcatgcattttgccagatttcaccttattataaacatgaagggatgtttaagtgattaaaaagtttctaaaccttcagaaagctttctgatttttgtgagacaatattttattcttttctccagagtatcaaggcttttctgtccagctctatcactatttgactttatgaccggctagcagcaccaagcaactattttaaaatacattcagaaaagtgtgtcctaagacacccaacatggctcagttgctgtcagttacctcattcccttctttagttggtgggacgatactacaaatccatacaagttgcaaaatccacatgaatatctaatgtccctgttcatattaccttaatttttctgctttaaagtaatcaactttttgtacaagtcagtcaaattatgtttttatgtatattgtgtatatgcatagacccagaaaatttcagacatatacctatttaggcttaaaattgggcatcacagtgtattttacaagaaaatatatttgaaaggcattttacaataattagtatttaattgtataggtcttgggatttgtaaaaataccagatccatcttttctttcagtagaatacattacttacctatggctagtaaatcaattaaataaattttatataaaaagttaacttattacatctggagctttcattctacgaaaggataaatatgacaacaaacatgtaatgaaaacaatagttagaggggtggatgaatgaatggaagaacatccaaatcatagaggttgtctttttattctgttactcattttcttaagttgtaaattttaaaacctcaacttcttttgaatctgttgagaaaacaatacacttggaatggtgagtcatcatcttagattcactaaaatctacctaagttttgaatggttctttttcagaatgcttgctgggactaagatttatctaaagtagcatgtttatgtttattttcatatcatctcggttgtggtttttggcagaaagaaaattgttttctaattacttaaaaaaatctgaggaaggaaggatggaagggagggagggaaagacatctaaagaagagtagctatgagttgatatttcagcctacccaaagaagcagagattgcgggacaaaaaataaaagataaaaaaaattggcttttcacgaaaatccatagagaaaatgaagtaggaaatcaaatgcataagtgcaaaacatagctcgatttaaagctaagtatatccttataaaataatgacttcttgaaagaacagcatgtttttcttggaaaacagggaaataattcccaaattattagaaaatcacctagattagacacatgaccacatgatcatttaattggtctcaatttttatttcaagagcagcaatgaagacatcaagaaagcagttaacatactaaatcttaagtaaactcaatgttgacgagaatgacaaccctaccatctgtgattataattactttctatatttgcgatttaaaaatgttttccttttaatttttggtagcctctgtaaattgtactgtcccactttttcttttgtaagaaatataattttctttcaattttatgaagcttttatgtctcaattttagtatagcaatttcttttttttttttttttttgagacagggtctgtgtctgttggccagactggagtgcagtagcaatcatagatcagggcagcctagaactcctgggctcaaatgatccacttcagcttaccaagtagttgaggtcactgtgccaggctaatttttttgtttgtttttagagagactgggtcttgctgtgttgcccaggctcttctcaaacagttggcctcaaatgaccctcctgccttggcctcccaaagtgctgggattacaggcatgagcaatcaagcctggcccttcatacagagatttaaaaatcagatttaatctggctcttctaacccatcctcacccaattggactgtaaagtttttgagtgtgtggatcacgtcttggttgttgttacttccccagtgtccagcatagagcccagaacaggttaaataataaatgtttgtttaataaataaatgattagaaaatgcatggtacatattttggcataggggcgtgtgtgtgtgtgtgtgtgtgtgtgtgtgtgtgtgtgtgtgtgtgtataaaatcacttccctgtatgccacagtatggagtctttggcaagatttttgcttctgttattcatttggatcaattaaattccctttccttgtttccctgtagaaactgcatgtagcactgactttagattactggcttaagtggttggggatcatgcattttgtcattaccaggtcagcaaaggagaacctgaaataattcacttctgtattcataaaagtatatatttgtatatatgtaatgtgtgtgtgtgtgtgtgtgtgtgtgtgtgtgtgtgtgtgtgtgtgtgtgtatagcttcaagttgtagaaaggaggagaaaaagtcactgtgggaggtggcagaggggaatttcctagagggaaacaatactgcaactgtaagaaaatgtaagaaatttgatagaagcacaaaatttcataaaatcagttataaaaattatgacatataagccccagttctgttgtcttgctataatgtaaaagtcacatttttttttaatcaaaatggaaaataaaaactagtagcagtgaatgtggtgagacagtagccactggcaccccaaggcaatggaaagcaagtgcccttgagcactacttttcacagccgggtgtcatgttttacctcacccagccgccttcttccctgcattttggtggcttgacaccattactgtcggggcagggtggggtggtaggggggtgcttgtgggagtgctggtgagggtccttcccttgctgcctgctctgtgctccctctttctggtgatgcagctgttctggtatactctctggcctctgtttttctaaatcctttaggtaggcttgctctccctattatcgctgggatcagaaaaaaagcagggtacgaagatccagaagacaggaaggaatacagtaagtgtgagtgaaggtaaaccagcctgctctcttcttgtggaacgatcacaaggtcatgcacttagatttatgaccaatcatcaagctattaatttactcaaatggtgtattaatttgttaggacggtcataagaaaatactacagatttggtggcttaaacagcagaaatttgttttctcacaattccaaaagctgtgaaatccaaggtcaaggtgtcagcaggtctggcttctccttaggactctggttgtcttgcagatggccaccttctcactgtgttatctcatggcctttcctctgtgcgcaggcatcgctgggatctctgtatgtgtcaaaatttcctgcttttataaggacatcagtcagactggattaaggcccaccctaaaggcttatttaaattttaatctcctctttagtggtcctatctccaaatatagtctcattctgagatactggtatttagggcttcagcatacaaattttggggtagacacaattcagcccataacaaattgtgctcatgaaatgatttactaataatgattgtggagagagatagtaatccgactgtgaatcctgaataattagtggcttcatgttcataaaagtggactcaataatgggcatgaacctgcacgagggaggcattgcggagaagaatacgtcccattttctgtaccaaagaaaaacaagtacacattgcaaacaataaatctttatcaaattcaaccaccttattttgaactctataatcattcaaacgtggcctagactaacatttgcttttttatagcttttatcaagaggagtggaggtattaaaattattattgaggggtgtagtgattttcaactgacgcaattctaccctccacctctcatgcaggggacatttggcaatgtctagggactttttttattgtaataagtgggaagtagctgatgatttcaagtaggtaaagaatagggatgttaaatctcctataatacacacgacagcctctcacaacaaaaaattatttgacccagaatgtcagtagtgctaaggtggaaaaaaccttatgtgaatcaattaaatcagggagaacttcagagcttttttaagacctttatttatatctagatgattgatattttttaggtattcatgaaaatactttcttttacctttcttgtggtaagcacaagataacactttcttgcctggttaaaaatggacaactgctacacttttaaaataatataaagcattcagtaattcaaaccatcctgtcttctgatttgtctgaattagtgtggctttactgcattttcagggcttattattctttcagtagggagactactaagatttcattaaagatagctgaataaatgatcaaatacattattgtagctccagactaggtaataaacattgagatatgcttttcaagtagtggtgaaaatactaggcaaaattacacatacacttacatatattaagcgaccatcctgttggcctggtatgtgaagctctgctgaactcttgcctaaatgcatggacccatcgattgtgaatgtgtgactacttgtgtgttttcatcataaccagctcatcctaatagcaaatgatatggtttggctgtgtccccacccacatctcatctttaattatagttcccttaatctccacatgctgtgggagggaccctagtagcaggtaattgaatcatgggggcagtttccccatgctgctctcgtgatagtgagtgagtactctgaaatctgatggttttataagcatctggcatttcccctgttggcactctttctccttcctgctgccctgtgaagaagatgcctttcttcccctttgctttccaccatgattgtaagtttccagagaccttcccagccatgtggaactgtgagtcagttaaccatcctttctatataaattacccagtattggatatttttcatagcagcatgagaacagacgaatacagcaaagaacacgttttatgaaggaaaaactttgaaaacaaagggactactttctttgatgagaggcccttcctttcactttaaacaaaacttcaaattatcctcagaatttgttctaattctccctacttctgggtaaaaattattagcagtaacagatttaacttgaatgtatatctccagttccccattctcttctctatgtagtgctgccaaactcaatagatttgaaacaaaaattacccagggaccttccccatctcccatgtccttttttcttatggcccagacctggaagtcctcctaagtgcttcctctccctcagcctaaccactctaccactatccagttgcaggtacactcttcctccttcacctcaccctttgatgccatctccactgctaccatcttgggtccaaccctcatgttatcttgcctgaaaaccgctaactttataactagtctctgttctatcaacatcctcttcctgactgtcatccacagatccactttctaaaatgccatcatgacgcttccatgcttataccactagcttttcagtggctaccaaaaaaaaaaaaaaaggttacattcccagccatcatgatctattcccttccacatctctgcatccttgtaaattgcccttgtcacccatgtatactgtgtattttaggtataaataactactagctatacctattttttgcctagagttccattctctcctcattttgtgatgaatcccatcattccacagatctttcctagaagacctttcataattttctatttccaaatggaagtgcctccttaactagctgtttttcttttcttctgtgtctgttactgcactatcataataaatcttaatttatatattttctatctttcctcctccctaagagtggcatgatggaaagagttgtttcagaaaaaatttggcaatggaatgctgcattaattggaatggaaaagaatgaatccctacaccaacagaaggaagcagtgtgaaatcctgacagggacaatttcattacaattacaaaatacataaatatgtgattacaattgtgagaactgctcaaaaggaaacaaggacccagtgagagtataaaaataagtacctaacatagtctgagtgtttggagaatgcttccctggggatgatgaggcctgaggatgagtaacaacatactctgctgagaaccacatgaatgaagccctgatgtgttaaactaaaaggataaggtgtctgaagtgtaatgaggcagagaggagagtggcaaaaataaactggagaagatgagtaggggagactactgttttcttacatgctaattaacccaataattctttatttcattttggagagaaacaagtgattatttattaatttattcattggcaatgcaatttaaaaacatattctttgtgtcttatttatcattgaggtttttaaaacattgaaataaacaataggtaatattttccaactgagatttaaaaaagaaaaaggtcagttttcaaatctattcccaactgctagagtttaataaaaactgtcataaatgttgacctttgttctgcaatcagttcagcatttatccatcacccaaccatgcagcctctcgcttgccaaaaggagtggaatgagaattgttagagtacttggaatgtttactgtcagcaaagtacaagacactacacaatcttgatgacctttatatgatagtcccatttctatatccaataagagacattaaattacttaataattctttggaactttctttttagtttttcatggctttgctcttaagttgaagaaaattattacatggatgaactacaaacggaaagcttctgttatcaccttttatcgtactttgtaaactatgataaatgaagtggcgaatgctgacaaagcattccaggctcaggatggcacctttcaaaggcaaaagaaggtgaacaatctactaacagcctttgaaacaatagtcaggactttggacttggcccataatgttgtgtttcatattgccctaagaaggttgctctaggaaggaaaatagtttagtggtgatggagagaagggcccctaagggaagaaatttgatgagaaggatgttacaggtgtctaaggaaaaggtaatcagctcctcagacaagatggaatgtgcattgaatttgaaaagatggtcagtgcttcattcatgtggttctcagtagagcatgttgttactcatcctcaggcctcatcatccccagggaaatattctccaaacgctcagactatgttaggtgcctatttttgtactcttactgggttcttgtctccttttgagcagttgtcacaattgcaattacatatttatgtattttattggcctaagggcttcctcccacgttcaatcataggaccatggaaacaaggttgaagcctatgttttaaaccattatgtgtctggtgctttgtctgggtcctggtacataatagatattcaataaattcttgtaaaattcattttttttcaactgagagtacaaaagtaatcagacagtaaatatatgtgtacccttttggagaaacattaaattcattccattagcaggcaatgagttctttatttaaaaaaaagttctttcagcaacttccaaatgtacatctcaagctctgaccactcctcccctttagactcctactaactgcttggaaattatttcagttgttctcatggccaaaattgaactcatcatcttactcttaccatctggtctttttcttctatttctttgttggattgattactacagagttatctaaactagaaacacaggagtcaccttagtcatcttcctttatcttaacactgtctctcatcatcaagtcttcttttacctataatgttcttatatgagtcccttccactctgtctttattaatattgccaactgatgtgaactactgtaagagcctctgaagtgatctccacattgctggttttcatataatccaccccaaaggtctttgtgtttgttggttggttttcattgctatagcaatattcacatttctgcagtactagtaaattacactaaaacgtactgtgttttataattgacctcgagtataaacatacaaattctactgctctgatgtttctttctaagcaatggttgaatcaaaaaacaatgaatttgcctaattttcatgatgaaaacgttcaaaattctcctaagatttcttgaaatccaagcttgtgattgtatgagaattcacaataaaccagctcacaaaatgtataaacttcagtttgtcatagtctatgaggaattactgaagcatacggcatttactcattgatttttaattcaggcaaaagttagaaatacacaaacacatacgcgtacggaggtctcaaagtcagttgtgcgataataaattatttaactcacccttatgataggtaaacagttttcctaaatcgccctcctgccccctgctaccctgactgaaaatatgtgctctggtttgtgctgttatttttgaacaatgtatgccggtatccgatgtaagatgattcatatgatactggtgttaccatggcaatccatcatgtatatagcaagaacactgtgaataccagcagctctttgttctcttcaagtttccattttcttttcttgtttttttttttttttttcttgtgcagtaatccagtggctatgacatcaagagtaacacaatctaattttctccttctgttgcttgtggtaggattcatactctgctagcaagggagttcttggccattttgatttgcaagagattttgcttctccctgatgtttcatttcgtcagcaaagtcttccctctggggaaaaacccacttgaattctaaggctgatagatgctgggaatcccatatgatgagtcctgtggaagcaggacattccagccctggggttgctgttgtctctgacttcagtatatgttcaaagtcatctcaaaataaagtaggaagatgagtgttaacctgcacatcactggcagtttttaaaggtaaattgccatttttacttaccacactggattctccaagtcagactaggatttgggttacaatggggatcattggggttaaattacttaagggataatgagatttacacagacccattaatctttctaagctattgagaaattttacacgtactgtgactgaggagaacctgatactgtaaaagagcaattcagtacagtttcaccatccaaggacttaccgatgcaaattcaaatacacgtgctaagtaaaatgggagagatagagcaagggagatataaaaattccaayagagcaattccagatgccccatctgccaccacgtgcaatggatctatgttcactagtaagtgtgattgaggtaggagatgtggatctaccactcttcccatctcagttcctttggtgaactgttgagtgtgaacattttgccttacattgggtgattcaaggggttctccacggtaaaagtgactatgtcagattcttgccacataatctaagagatgactccactgaagtttgtgttactctaccatcaaaagatgtatctatgtttacagacattcttttattcaatttgaaaagaaatttcaatgtcaataataaatattagcctcatttgtgaattaaacagatgttaagattgcatgcacgtcagtaaaaaaactgttgtacaggaaactctatgcacaggagcctcctaccatgtcatccagctcagctacctttttctattcagctttctgcaagtatttattttatataatgcacatgtaactataaggatacaaacatggatcatacaaagaacctgccctcatggagcttaaaatctaaagacagatgataagtgctaaacataaataactgtccacaacattaagatatcagtaaattcattcattcatttaattcactcatacattcacttgtgcagcaaacatttactgaataggaactgatttcaaaattttcagctaggaatgcaaaactgagagagaaaaattcttagccttcaaaaaaatcaaagtcgaactgctcagacaaaaattcaaagggaaaaataaattataactacataaggactttaatagtcctctaggagtacattagaccaaacacctaccaccagctgggctattcagggattatcttacaaataaggtcatgaaagaggatgaagtactctcctgaaaggcagtgcctaaaaagagggtggctggcagagaatgaactcacattacatagcactttgcagtttgcaaagtagatagtcatatattgtttcctttgactatcacatcaactgataagaaaactgagacccagcagattcaaaggtcttactgaagaccataaagttagttaaatgtggccaggtgcagtgagtgactcacacccataatcctagcagtctgggaggccaaggtgggcagatcatttgaggccaggagtttgagaccagcctggccaacgtggtaaaacctctactaaaaatccaaaaataaaaattagccaagtgtggtggcatgcacctgtaatcccagctactcttgtgtctgaggcacgagaattggttgaacctgggaggcgaaggctgcagtgagctgagatcgtgccactgcactccaccctgggagacagagtaagactctgtctcaaaaaaacaaaaaaaaaattgttaggtaaatcctggagttgggacccaggcaccagtcatctgttctctaaatattgtcccatgtgttctgttaagtaccatggagaaagcaggagtaaaatattttggcagctctgagaagggagaatttactttcaactgggagtatcagagaatgctttgtagataaaatgacatttggtcttgcagcttgcattcagttatgcagagttgaagatgaagggcatttcaggctgggagaacaatctcacaaaggtgtggatgtaggaaaatacatgaacgtttatagaaaaaaaattgagtgtggtcagaatttattgaacttgagaggcaatcatgtagataggagataaaacaggaaaaggagaatgagactatatttttagggtcatgaaaattaagcaaaggaatattttctaaactaaggtgagctattaaagattttgaagagagggagtcctatgatcatagctttgcttatgaaagaatgaagtggcagcaatgaagacacaccttggaataccagaagactagagtaaggagactaatgaggggacttatagcaatcatttgctttgcaggtaataaggtggtaactaatacaagatgatggattacaatattaaattttgtattcttttaagttctatgtttctgcaatggctaaatgcaaacctatcaggaaaagtaaagcgttttgttgttattgttgttgtttttgcttttcaaaaagtgcaggtaattagggcctaacgtggaatggtccatgctaggaataaagtagatagcggcgaatgtttgctagagacattgtgatggactgatctgccctactattacatcctcagcaataaatatgaatgtttaagtggtacaattgccagaaatcagccaaagtttggcataattgttagagatttgttggctgtggatagaactacataattttggaattgtagaggagaacagagaagaaaccaacaaaaaatagtactagtactctgtcactggaaagaagtatgtttaaggccacacagtgaaagttagccatgagcttgagtgctctatcatttttcattatgttgtttgtttattaaaaaaaaaaaaggtaacagctttttctttttaaccaaacatttcttactggaagttcaataggtgtacagttgttttgtttggctagacatggatatttgtgtgttattccctttcagtagttctgaaaaccattttatctttagatacattattttcccaggagcttgggtattttattgaagctgtttcaaatgcatttaatgtcctttgtaatggatttctttatctcttccccaatgctcttggctggagatgttactttttatttgccttatcggtgtgagcacctcattgctataatcaatagatatagtactttagcattctgtacattttaatatgatatataccaaatataatgtataaatgaaaagttatagataatttttgcttaagttttcttttatagagaattgttaacaaaggatatacagccaatatgttaaaataatacctagaaattaaaaaggagtaaagtagaatagtttatctgttgtactaagacttcatacacaatatttcgaaaagtgggaatatctcttgggtgaaatacttcatatatgtattgtatgtacatacatgcaatatgtacacacagaattatataaaatatatgtatatgtatacatctatatgtacagaacatataattttattagcatttcttgtaatggcattttattataaatccaatgacctcaattattctatgggtaagtgctaagtatgtcaagagagctggcatagaaaatggaaaaagcactacaccccttagcttgcaagtagatgtgaattttctgcctttgactttgttgaatctgtgatgaatcatatgtttactctgattaacataaaacatctggatgatctaactttggggacacattgcttcatatgcactgaatgcctgaaaattggtagaattttagattctttttctttataaatgatactacccgaattcctgcaatacctagagagttacaagtgcttagctctgaccttttattccattcaattgaagttgtccacctttagtttattacacatatgactcttagtagagcaaacatctggattattgtcaacagttctcaaacacaccatttggatttcactatcagactacgaacgaacccccatggaaaaaaattcaggcatacaggctacacccagatcctgaatagcccctggttttctggttactattttctcaggccagatccaagaagtcctctttgggcttgtctctgggattctctgataaaattggctttagattgagactgacgtgaagatagagctggtcattgaaagacagaaacagatgtgaatgaaataattctcctttgagacataaaaaaatgtaagatataccaagaaaggggaatttgagttgttcattttctgacaactgtgaaattgttgacccggacaagagagtagggagattaacaatgtgatcatgttcagggcccactgtgccactgaattaagacaatgttggcattctcctcagtcatcttccgaaaatagagatttagagttaggaaaggaatagcctatcccattaactacgtcactcatctcatgcaggtgacctctcatttatgtatttctcaggatatagaccaacgctggagtatagaaatattatgagacacttcgtaattttaggtcttctggtaccacatttaaaaggtaaaaagaaataggtaaaatttatttcaaggatatattttatttaactcactgtatcagattattttaacttgtaaacaatatatataattattaatgagatatttaacattctttcctcatactttgtctttgaaatcctgtatgtattttttacttacatcacatattaatttggatgcccaattgtcctcaattatactggatctttattggacatttagatctcataagatttacaattagaaatatagattcacttcccaagttgttccaaatatagtattattaaatcaactatcagtcttttaattcataaatattaagtaagactaaaaatttagtcctttagtcatactaaccccctttcaagtgcccaacagcctcttgtggccattggctgccgtattagacagttcatatttagattatctgggtttgaactcagagtctgccactcactgactgtattggcaagttgttgccaacctgggcaagttttttctctttttatgcttcagtttcctcacctgagcacacctttttccttgaagaagctctcctgaagaaaatcccgtatttttcttcaggacattgctatttttccacttaaactcagaaccttagagtgatcactgaatcctcctctccctcatcagctttatctgccagaaggtcaagtcctctgagatgtacactgtaaaatctcatgctttcctgtgacttcatttccactgccactaccctctccttttgcatggatagctgcaatgatctcctatttaattagcctcagtctccagactctagccatcactccacattatgccctctggatgctgctactgagttcattttctgaaaatggtatctttatcatactctccacagttcaaactatttcttcactgcccgtcacttccagcataaatccatgtcctctgtgaaaccttttttgacaacttccatgccagatccaaatgacaactcccttccttgtgctgtcatggccctccacacagacttctgccatagccccagagtcctagtccacatataggagtacatgggctctaagccctacacagactattttgttgttgttatttttgttttgttttgttgtttgttcgatatcttgatatctctgtaacagagcacagtggtttcttgacagtttctcattttctgtatgagctagtgaatgacattcctttgtctggcattccaggccttcagaattagctccacttgactcttctggctccttctcttgcttttcatccacacagatcctctggtatagacaaactggtgtattactgtctcacaaatatgtccccaatgtttgtgtctccatgccttggctcgcatcctctcctcttctgaagtgtccctgcattcttcttgatctgcccaaattctaccctttcttcaaggtccagtccctccctcttccatgatgaagactgcggagcatgatgcaattcactgtgtttcaaattcaggattgggtggcctgatggaaggaggccaggcttggggtccaagtggatctgtttcttctgttttccgccaagttgcctaccctctctgaggttcacattccatatctttgaaatcacagtaacaaaacataaggtgcagaactatcttgagtattaagaataacgtgtgcactggcattcagtgagggttcagatggagcacgtgaactctgttactttcagtacagtcataggatatgtaatcatgtagcttctaaaatgtctttcattgtaagattttgttgtcatttggattgctatacaattcatgcttgatttctaaactagactgcaagtgtctggactgaaacaaatgcataatagaattctgagcagatatgcacagatatatatatgtgtgtgtgtatgtgtatatttgtgtgtgtgcacatgtatttgtagatatcaagggagagaggcactttcatgtgtattgattcattcagtccccacaagaaagcatcattctaggaggaagttgaaaatgtccctattttatctatgaagactctagacttgaagagtttgagtccttcccaaatcagtccaactcttaaagtgatagaagcaaaaaattcacagtgtttacacatcttttccaaagctgtttgatgttattatttcccgcatatcacatctgtgagattatctgcctagatcaatatatgtgctaaccatctgtcaatctttatctacatgcaattgtacccaggttcagggattgtgggagggagaaaggttaggtggttgtaagaaggacactgcatagtatggtaggcaaatacagaatacctgcaacaagacaaccatggcatttcttttttttttttttttttttttttgagatggagtctcactcagtcacccaggctggagtgtagtggcgcgatctcggctcactgcaagctctgcctcccgggttcacgccattctcctgcctcagcttcctgagtagctgggactacaggcccccaccactacgcccggctaatttttttgtatttttagtagagacggggtttcaccgtgttagccaggatggtctcgatctcctgacctcgtgatccgcccaccttggcctcccaaagtgctgggattacaggcgtgagccaccgcgcccagccaaccatggcattttttgttaggtcactcagcattggtatcaagaataacaaatgacacttgagtttctttttcctgaaaaagggcaggaagagtctaatagcaagtgcaattgccacaggcaacagtgttataactggaaaatcctaaaatgtagataattttcctccaaatgctttctaacaaaagatagacaagtttaaatttggctgatttcatatctaccataatatagtaccagcaatgccaagatacagaaaactgcctaagaaaaacagagttcagaagacttcggataaattatcatcttaagcttaaccttatacctataaaaaattcagggatatcagttatgacttctcattgagtagtctcatgttagaccaaaatagtttcccatattttggtgaaggaccagaataacttaccagtaaatgaaacaatcattttctttttgctttatactcattctgcatgtgatttgtataggggatcaagtcaaagattgccagtacaaagtaacaacctctcattgtattgcttaagttaatcattaatattttccatggatcaataccctgtagaagcatgagatgcagcagtgatcttcaatttcatgtgcttgccaagtaagaacagccatgggccagattgttgggagccgtgccatgagctacagaccctcagctcccctctataatcagttcttcccccactccagtgctcccaacttgccctaagcagagcgtaattgtggatgtgtaactaccgcagaggggagtatgctttttatgttgttcaattcttcactttctcttctgcaattgaaagttgagctgttagatttcctgaaatgaaatggtgacaagagaaagtaacagaagtagcctttataagtgcctgacttctgggtaacagaagtgacttaaaaaaaataaaagtacaaaacgttgcatttaatgtaaaagatgactgcattagtacaacccttgaaaacattcaagttcttttcagaataaccaccattaaggagttgacaaatattttatgctttaaagtatcctataaaagttcatcacagaaataaaaagcctcctgttcttatccttctcaacaaagccctcttgtatatagatattgagtctggcttacctctgtatcctgttgtgctgataaaccaagaaccttgcaaaaatagatgcacgataattgatatttaataagtgagcgaatccattaatgaaaagagtgctatttcagagagcagtgttcatttagatagatggtcccagcgtcattaagtaaaaggatagagaatacttgcaatacatttggcgtagtgttaagaattttttaaaatgttttaaatgtgatcttttttatgggctgaattgtgtcctctcaaaatgttgaagtcctaacccctggtacctcagaatgtaaccatggagataaggtctttaaagaggtgattaaattaaaatgaggtctttagagtggcccctaatccaatctgaatgatacctttataaagggagggaatttggactcacaaagagacattagacacatgcacacagagacaaccatgtaaacacatggtaagaaggcagccatctgaaagccaaggagacaggtctcagagaaactaaacctgttgacgcctttgatcttggacttccaaactgtagaacactgacaaaacgtattactgtcgtgtaagccacccaatctgtggtattttgttatggaagccctggaaaattaatacagtcttttttatttgctacctttgaaagccctcttgtcaaatgacggtaaagaatagaagacaataaagtgtcagtaataaagggtgacgagaagaaacaactagagatgtgagaggaccaatttaggaaatggaaaggagaggaaaaaatcaacaaagttgagaatgctaattacaaagtgcccacagaggagggcaaaaccagcaaaccattccctttgtcaaaatcttgaaagatggcaattgaggaaccaagaatcttaaaaaggggggaaggtggatgagaaatctgcatatgaaggggagtcctccataggttctcctctcaccctgctcagctaggagaccagtgccactttatcctcattagaatggaaatttatgctataaaaataaataagagaagtcttaacctggggatactaggcacattggaaggtgagagagtaaatgaaagtctatcaactgaatagtgaagttctgacttctctagtagcacctgggaataagaactctgtcagttagccttataatgccaagagaggagatagaaaaattgtttttctataaaaattgtctaaaaaaatatctgcactcccatgtttattgtagcactattcacaatagctaagatttggaagcaacctaagtgtcccatcgacagacaaatggatgcaaaaaaacatgcagtacctataaacaatggagtactattcagccataaaaaaagaatgagattgtgtaatttgcaacagcatagttggaactggaagacattatgttaaataagccaggtacagaaagataaactgcatatgtcctcactaatttttggtaactaaaataaaaatacttgaacttgccaggttcaggggctcacgcctgcaatcctagcactttgggaggctgaggcaggcagattgcttgaggccaggagttcaagaccagtatggccaacataatgaaaccccatctctactaaaaatataaaaattagccagtcatggtggtgcatgcctgtaatctcagctacatgggaagctgaggcacaagaatcacttgaacctgggaggcagaggttgtgatgagatcgtgccactgcactccagcctgggtgatggagtgagactgtctcaagaaaaaaacaaaacaaacaaacaaacaaaacacttgaactcgtggagatagagagtaggatgccatttatcaaagagtgggaagggtagtggggaggaagaataagatctagtatttgatagcataagagggtgactacagtcaacaataatttattgcatatttaaaagcaactaaaagaatataattggaatgtttgtaacacaaagaaatgataaatgcttgagatgatggctcctccatttatcctgatgtgattattacacactgtatgcctgtattaaaatatttcatgtgacccataaattcatatacttactatgtactcataagaattaaaattaaaaataaaaataaccaagaagaattcttcttcagaaaaatggaattaccacccagagaaaagacctatagtactggcattagatggttgcccaataaagaagccaagggtctttattcctcaattaccccatgtattaggccattattgcgttgctataaagaaatacctgagagactgggtactttataaggaaaacatgtttaattggttcacagttctgcaggatgtacaagcatggtgctggcatctgctcagcttctggggaggcctcagggaacttgtagttgtttcagaagacaaaaggggagtaggtgtctcaaatggtgagagcaggagtaagggggttgtgggagttagcacacacttttaaacaactagatctcagagagctcattcactcactcaccaagccataagggatctgcccacatgacccagacaccacgcaccagggcccatctccaacactggggattacatcccaatatgagatttggaggggacacccaaactgtatcattccgcccttggccccctaaatctcatgtccttcttacatggcaaaatggaatcatctcttctcaacagtctcccagagtcataactcattccagcattaactcaaaagtcccaagtccaaatacaaaatcttgtctggaaatgagttcctcccacttatgagcctgtaaaattaaaacaagttatttacttccaagccaaggtacaatagaggtacaggcattgggtaaacattcccattctttttttttttttttgaaatggagtctcgcttagtcacccaggctggagtgcaatggtgcaatcttggctcactgcaacctctgcctcctgggttcaagcgattctcctgtctcagcctcctgagtagctgggattacaggcacccgctgtcatgcccagctaatttttgtatttttgtagagatggggattttcatcacattggccaggcttgtcttgaactcctgacctcaggtgattcacctgtctcagccgcccaaagtgctgggattacaggcatgagccatcatgcctggccaacatttccattctaaaaggaagaaatcagccaaaagaaatgacttcaggccccacccaagtctgaaacacaacaggacagtcattaaatcttaaagttctaaaataatctcctttgactccatgtcccacatccaggtcacactgatgtaagggtagactccaaggccttgggcagctctgcctctacagcttttgcaaggtgaagcctccatgactgctctcatgggttggagttgagtgcctacggctttcccaggtataggatgcaagctgccagtggatctacattctgggacccacagaacaatggcttccttcccacagttccactaggcaatgccccaggggggattctttgtgggcagggcttcaatcccatattcccttctgcactaccttagtagaggttttctgtgaggactctgtccctgtagcatgcttctgcctggacacccaggctttctgatacatcctctgaaatctaggcagagactaggatcactctttccattctttctatctgaaggcttaataccacaaggaagccacaaaggcttacagcttacatgctccagagtggcaacctgagccatacctgaggctctttgagccacggctggactggatggaccatgatgcaaggagcagcctcctgaggtagacagtgtagtggtgccctgtgcttatcccctaaaccatttagtcctcctgtaccactgggactgtggtgggaggagctgcctagaagatctctgaaatgctgtaaaggcctttttcccattattttggctattagcacttgttctcttttagttatgcaaatttccctagcaaatgattgcttgcagcctgcttgaattcctccccaaaaatggccttttattttctatcacatagctaggttgcaaattttccacacttgtaagctctgcttcccttttaagtaaaaattccaagtttaggttatttctttgcttctgcatctgagcataggttattagaagcagccaggtcacatctcaattgcttcagtgcttagaaatgtcttctgccagataccctaagtcattaactcttaagttcaaactttcacaggtccctgggcatgaatataatgtagccaagttctttgctaaggtataacatgggtgacctttgctccagttctcaataagttcctcacttacacctaatactttgtcagcacggactttactttgcagatcactatcagcattttggtcatgaccatttaatcagtctctaccaagtttcaaacttttcctcatctccctgccttctcctgagccctcccaattcttccaacctctgtctcttacccagttccaatgtcattttgacattttcaggtatctttatagcaatgccccactccttggtaccagtcttctatattaggctgttgtggcattgcaataaagaaatatctgagactgggtaatttatgaagaaatagaaaattaactggcttgcagttctgcaggctgtacaagcataatgccagcatttgctaagcttctggagaggcctcagggagctttcaatcatggtggaagctgaagagagagcagctatctcacgtggcaatagggggagcaagagagagagcgggaaggaaggtgttacacacctttaaacaaagagattttatgagaacttgctcacaaagctataagggaaccactcccatgactcagacacctcccaccaggccccacctccaacactgaggattacatctcaacatgagaattggaggggacattcaaggaacaccaccctataatgaaccccaagactctacaagtccagttaaatcattcaaggctcccagtcagtattttagtgtctccctgttgaatatgaatagatagccaagtctccacaaaactctgaggaaattcttcaacaaaaagcctaatgcaaacaaatgaaaataatgatgatgattaggttgatataaaaagagtttaagaaacaaatagacgtttcagaaaaaataaacttcgtagccctagacagatgacaagttatcacattaatgaaacaaaaggatactatacaaaattatcaagtaagaacaaaagagagttagaatttaaaacaatgaaagaagatgctaataaataaaatcagagatgaaaagggagatgttgctgggcacaatggctcacacctgtaatcccagcactttgggaggccaaggcaggcagatcatgaggtcaggagtttgagaccagcctgaccaatacggtgaaatcccatctctactaaaaatacaagaattagccagcgtggtggcacgtgcctgtaatcccagctactcagaaggctgaggcaggagaattgcttgaacctgggaggcggaggttgcagtgagccaagattgtgccactgcactccagcctggatgacagagcaagactctatggggggggggggggggaaggaaagataaggaaagataagggagacgttacaagcaataccacagaaattcaaaggatcattagatgctactaggagcaactatatgcaaataaattggaaaacctaaaaaaatgataaattcctagacaaatacaacctaccaagatttaaccatgacgaaatccaaaacctgaacagaccaataccatcaagattgaagccataatgaaaagtctcccagtaaagaaaagcccaggatctgatggctttactgcttaattttgccaaacatttaaagaagtaatatcaatcctactcaaactattctgaaaaatagaggaggagggagtacttccacacttattgcacaaggccagtattaccctcataccgaaacagaccaaaggcacattgcaaacagaaaactacaggccaatactcccaatgaacatttatgcagaaatcctcaacaaaatactagcaagccaaattcagcaacacattaaaaagattagtcatcgtgaccaagtgggatttttcccaaggaagcaaggatggttcaacataatgtaaatcagtcagtgtgatacatcatatcaatgaaggacaaaaacatatgatcatttcaatttatgctgggaaagcatttgataaaattcaacatcccttcatgataaaaactcaaaaaactgaggatagaaggaacatacctgaacacaaggaaagccatatatgacagacccacagctagtatcatatcgaatggggaaaaattgaaagtttttcctccaagatctgtaacatgacagggatgtccattaccccttgagcaatcagacaggagaatgaaaggatattcaaattggaaaggaagaagtcaagttattcttgtttgcagatgatattattttatatttggaaaaacctaaagacttcaccaaaacactactagaactggtaaacagattcaataaagttgcaagacacaaattcaacatataaaaatcagtagcatttctatatgccaatggtgaacaatctgaaaaagaaatcaagaatgtaatcccatttataatagctacaaataaaatacctaggaattaacttactgaaagaagtgaaagagttctacaatgaaaactataaaacacggatgaaagaaattaaagagaacacaaaaaatggaaagatatttcatgttcatggattggaagaatcaatattgttaaaatgtacatagtacccaaagcaatcttcagattcaatgcaatctctatcaaaataccaatgacattcttcacagatatagaaaaatatcttaaaattcatgtataaccacaaaagacccagaatactcaaagctatactgagcaaaaagaacaaaactggaggaatcatattacctgacttcaaataacactacagagctatagtaaccaaaacaggatggttctggcatgaaaacccaggaacaaattcatacatgtacagtgaactcatttttgacaaaggtgccaagaacatacattgagaaaggacagtctcttcaataaatggttctgggaaaactggatatctatatgcagaagaatgaaactagacttctatctcttgccgtatacaaaaatcaaatcaaaatggaataaagacttaaatctaagacttcaaactataaaactattgaaagaaaacattggggaaactctccaggacattggcctgagcaaagatttttttttttttttttagacagagtctcactctgttgcccagactggaggctgaagtgcagtggtgtgatctcagctcacagcagcctctgcctcctgggttcaagtgattcttgtgcctcagcctcctgagtagctgggactataggtgcacaccaccatgctgggctaatttttgtatttttagttgagacagggttttgccatgttggccaggttggtctccaactcctgacctcaagtgatatacctgcctaggcctcccaaagtgcatggattgcaggtgtgagccactgcgcctggcctgagcaaagattttttgagtaataccccacaagcacaagcaaccaaagcgaaaatagacaaatgggatcacatcaagttaaaaatacctgcgtagcaaaggaaacagtcaacaaggtgaggagacaacccacagaatgggagaaaatattagcaaactatccatctgacaagggattaatatccagaatatattaggagctcaactccgtaggaaaaaaaatctgataatccaattaaaaatgggcaaaacacctgaatagacatttctgaaaagaagacatacaaatggcaaacagtcatatgaaaaggtgtgcaatgtcattggtcatcagggaaatgcaaatcaaaactgcagttaaatattatctcaccccagttaaaatggcttttatccaaaagacaggcagtaacaaatgctgacaaggatgtagagaaaagagaacactcctacacttttggtgggaatgtaaattagtacaaccactacggagaacaatttggaggttcctcgaaaaagctaaaaatagaactcccatatgatccagcaatcccacttctaggtaggtatacacccaaaagaaaggaaatcaatatatctgcacttccatatttattgtagcactattcacagtagccaagatttggaagcaacctaagtttccctcaatagacgaatgaataaagaaaatgtggtacatatacacaatggagtactgttcggccatagaaagaaatgagatcctgtcatttgcaacaacatggatgtaactggaggatgttatgttaaatgaaattatccaggcacagaaagatcatcttcacgtattctcactatttaagggagctggaaattaaaagaattgagatcctggagatagagattagagtgatggttaccagaggctaggaggtgtagtggatgggaggaagtaagaagtggggatgtttaatgggtacaaaaatataattagatagaacaaataagatctggtatttgatagctcaacagggtgactacagtcaacagtagtttatcatacatctcaaaataactaagagaatataattgaattgtttgtaacttaaagggtaaatgtttgcagtaatagattccctgtttaccctgatattattatgcattgcttgcctgtatgaaaatatctcgtgggccccataaatcaatcaatctatctatctatctgtctgtctgtctgtctgtctgtctgtctgtctacctacctacctattatgtaccaacagaaatttaaaatttaaaaaattatgttttggagacgtctagaaaaattggtgataatgtcacataatcaaataaagaaggtaatatataactccagaaaaaacaaaaagttgttccataaataaaacataattatggcacatcatttggtttatcagtaaacgttactttgcagggatgatacaatagaacactgaatgtttatttagccaataattgttatataactgtaatgggaggatagaaagagggaagtagagaggtgaaatggtgaaagagtgtgaaatcttcatcattcataatagaaagtcagttagaaatatggaatttaaaaaaaaatagtttgagagccttatgaagagggtggcacaaaagactcctgcaacttgttctaagccctgtgcatacaatttggggtgtgtgggttagtttaataattattttgtaaatataaaaggaaccaaagcaaccaaatttctggatataaatgtcctgtgttgattatcatgataataggtagacatcttggattggaattttttaacatttgaatggaataccccatttcccctttaatctttgataggtttaacatggtcactaactgtagagtagggacttgtcgtgctctttattggcagaagtgtgactggctacccctgaccgttcgggagaggagacatgtacacctggccaatcagaccagcagattcactgctggtgatgagtgaagttgcagatgtcagggacagcttgtgctgttcaggttaaattatctcacttcagctctcactctaaagatgatttataactagtattcttcactttcagtcttttcactagcaagcaggatacttatggaaaataattaggatgaaaagaggtcactctatcacaatagtgagtttttgaattcacactttaaacgagatgatcctccttaggaaaagcaaaataaaacgaatttccatgccattgttgattctacttgagttaaatactaacataaaaagttggttttctgtgcatagcctggagaatcttgtctctcagaattatcatgccccaggccattccttgcagattttgaattccctttgtctcaaaaacatccagaaaatctttttgaccttcgggtggttggcagaacatgtgttgtgagggcacctcagtttagaagaaaagccctgaacttagttcaaaagaagggctttccagcatgctattcattcagcttaggactgccaggcttcctgaaagacaggtgtgtcagaaacaaagtaaataaacagaaactcacaatgtccagacctttctctccagagcagcacagttcccttgctgagcggcaacagccaaggctttaagctgttccctctcccttttctgttaattgagaaaaccaattgctgcaagagcaacatcagcagagctaaatgtaaatggagtttaatagaaagagacaaataacccactgagaacccctaacatttcagtgtaataccccagagttccacaccataaacttggtattccagtataaagctcatctctcaattgcacgccaccctcccccatcttattcactctcttgcattattaaaggagtgatctcccccatgggatcaaaatagatagatagatagatagatagatagatagatagatagatagtctctaatatatgtattagaaacagagtctgtgttgcccaggctggagtgcagtggcatgaccataggtcactgtaaccttgaacgtttgggctccagcgatctacaggtgtgcaggtctacaggtgtgcaccaccatgtccagctaatttttaaaatttttgtagagacaggatatctctatgttgcccaggctggtcttgaactcctcttctcaaatgattctcctgccttggccacccaaagggctgagaatacaggtgtgagctaccatgcccagccataaacatgaaatttacttatgttttatgtataccatgtgcacatagcctgaaggtaattttacacaatattttaaataattttgtgcatgaaacaaagtttgtgtacactgaaccatcagcaaaggagtcactatctcatgtcagtgaccaaaaagttttagactttggagcattttggatttcagagcatcttgaattttaggtttttggatggggatgctcaacctgtatatatgcatacatgcatatttatgtaacatacataatggtacctaaaacttagcaaatactcatatgttagctattatttttgttggtattactatgaataataactattagcattttctctcatatctaaaatgcagttggtaaatgctaaactcataggaatgttgtaaagatttatttttttattttttttattattatactttaagttttagggtacatgtgcacattgtgcaggttagttacatacgtatacatgtgccatgctggtgtgctgcacccactaactcgtcatctagcattaagtatatctcccaatgctatccctcccccctccccccaccccacagcagtccccagagtgtgatgttccccttcctgtgtccatgtgatctcattgttcaattcccacctatgagtgagaatatgcggtgtttggttttttgttcttgcaatagtttactgagaatgatgatttccaatttcatccatgtccctacaaaggacatgaactcatcattttttatggccgcatagtattccatggtgcatatgtgccacattttcttaatccagtctatcgttgttggacatttgggttggttccaagtctttgctattgtgaataatgccgcaataaacatacatgtgcatgtgtctttatagcagcatgatttatagtcctttgggtatatacccagtaatgggatggctgggtcaaatggtatttctagttctagatccctgaggaatcgccacactgacttccacaatggttgaactagtttacagtcccaccaacagtgtaaaagtgttcctatttctccacatcctctccagcacctgttgtttcctgacttttgaatgattgccattctacctggtgtgagatggtatctcattgtggttttgatttgcgtttctctgatggccagtgatggtgagcattttttcatgtgttttttggctgcataaatgtcttcttttgagaagtgtctgttcatgtccttcgcccactttttgatggggttatttgtttttttcttgtaaatttgtttgagttcattgtagattctggatattagccatttgtcagatgagtaggttgcgaaaattttctcccattttctaggttgcctgttcactctgatggtagtttcttttgctgtgcagaagctctttagtttaattagatcccatttatcaattttggcttttgttgccattgcttttggtgttttagacgtgaagtccttgcccatgcctgtgtcctgaatggtaatgcctaggttttcttctagggtttttatggttttaggtctaacatgtaagtctttaatccatcttgaattaatttttgtataaggtgtaaggaagggatccagtttcagctttctaaatatggctagccagttttcccagaaccgtttattaaatagggaatcctttccccattgcttgtttttctcaggtttgtcaaagatcagatagttgtagatatgcggcgttatttctgagggctctgttctgttccattgatctatatctctgttttggtaccagtaccatgctgttttggttactgtagccttgtagtatagtttgaagtcaggtagcgtgatgcctccagctttgttcttttggcttaggtttgacttggtgatgcaggctcttttttggttccatatgaactttaaagtagttttttccaattctgtgaagaaagtcatgggtagcttgatggggatggcattgaatctttaaattaccttgggcaatatggccattttcacgatattgattcttcctacccatgagcatggaatgttcttccatttgtttgtatcctcttttatttcattgagcagtggtttgcagttctccttgaagaagtccttcatgtcgcttgtaagttggattcctaggtgttttattctctttgaagcaattgtgaatgggagttcactcatgatttggctctctgtttgtctgttgttggtgtataagaatgcttgtgatttttgtacattgattttgtatcctgagactttgctgaagttgcttatcagcttaaggagattttgggctgagacaatggggttttctagatatacaatcatgtagtctgcaaacagggacaatttgacttcctcttttcctaattgaataccctttatttccttctcctgcctaattgccctggccagaacttccaacactatgttaaataggagtggtgagagagagcatccctgtcttgtgccagttttcaaagggaatgcttccagtttttgcccattcagtatgatattggctgtgggtttgtcatagatagctcttattattttgaaatatgtcccatcaatacctaatttattgagagtttttagcatgtagggttgttgaattttgtcaaaggccttttctgcatctattgagataatcatgtggtttttgtctttggctctgtttatatgctggattacatttactgatttgtgtatattgaaccagccttgcatcccagggatgaagcccacttgatcatggtggataagctttttgatgtgctgctggatttggtttgccagtattttattgaggatttttgcatcaatgttcatcaaggatattggtctaaaattctcttttttggttgtgtctctgcccggctttggtattagaatgatgctggcctcataaaatgagttagggaggattccctctttttctattgattggaatagtttcagaaggaatggtaccagttcctccttgtacctctggtagaatttggctgtgaatccatctggtcctggactctttttgttggtaagctattgattattgccacaatttcagatcctgttattggtctattcagagattcaacttcttcctggtttagtcttgggagggtgtatgtgtcaaggaatttatccatttcttctagattttctagtttatttgcatagaggtgtttgtagtattctctgatggtagtttgtatttctgtgggatcgttggtgatatcccctttatcattttttattgcatctatttgattcttctctctttttttctttattagtcttgctagcggtctatcaattttgttgatcctttcaaaaaaccagctcctggattcattaattttttgaagggttttttgtgtctctatttccttcagttctgctctgattttagttatttcttaccttctgctagcttttgaatgtgtttgctcttgcttttctagttcttttacttgtgatgttagggtgtcaattttggatctttcctgctttctcttgtgggcatttagtgctataaatttccctctacacactgctttgaatgcgtcccagagattctggtatgttgtgtctttgttctcgttggtttcaaagaacatctttatttctgccttcatttcattatgtacccagtagtcattcaggagcaggttgttcggtttccatgtagttgagcggttttgagtgagattcttaatcctgagttctaatttgattgcactgtggtctgagagatagtttgttataatttctgttcttttacatttgctgaggaaagctttacttccaagtaaatggtcaattttggaataggtgtggtgtggtgctgaaaaaaatgtatattctgttgatttggagtggagagttctgtagatgtctattaggtctgcttggtgcagagctgagttcaattcctgggtatccttgttgactttctgtctcgttgatctgtctaatgttgacagtggggtgttaaagtctcccattattaatgtgtggaagtctaagtctctttgtaggtcactcaggacttgctttatgaatctgggtgctcctgcaggtgcatatatatttaggatagttagctcttcttgttgaattgatccctttaccattatgtaatggccttctttgtctcttttgatctttgttggtttaaagtctgttttatcagagaccaggattgcaacccctgcctttttttgttttccatttgcttggtagatcttcctccatccttttattttgagcctatgtgtgtctctgcatgtgagatgggtttcctgaatacagcacactgatgggtgttgactctttatccaatttgccagtctgtgtcttttaattggagcatttagtccatttacatttaaagttaatagtgttatgtgtgaatttgatcctgtcattttgatgttagctggttattttgctcgttagttgatgcagtttcttcctagtctcgatggtctttacattttggcatgattttgcagcggctggtaccggttgttcctttccatgtttagcgcttccttcaggagctcttttagggcaggcctggtggtgacaaaatctctcagcatttgcttgtctgtaaaggattttatttctccttcacttatgaagcttagtttggctggatatgaaattctgggttgagaattcttttctttaagaatgttgaatattggcccccactctcttctggcttgtagggtttctgccgagagatctgctgttagtctgatgggcttccctttgagggtaacccgacctttctctctggctgcccttaacattttttccttcatttcaactttggtgaatctgacaattatgtgtcttggagttgctcttctcgaggagtatctttgtggcgttctgtgtatttcctgaatctgaacgttggcctgccttgctagattggggaaattctcctggataatatcctgcagagtgttttccaacttggttccattctccccatcactttcaggtacaccagtcagacgtagacttggtctattcacatagtcccatatttcttggaggctttgctcgtttctttttattcttttttctctaaactttccttctcacttcatttcattcatttcatcttccattgctgataccctttcttccagttgatcgcatcagctcctgaggcttctgcattcttcaggtagttcttgagccttggttttcagctccatcagctcctttaagcacttctctgtattggttattctagttatacattcttctaaattttttttaaagttttcaacttctttgcctttggtttgaatgtcctcccgtagctcagagtaatttgatcgtctgaagccttcttctctcagctcgtcaaagtcattctccatccagctttgttctgttgctggtgaggagctgcgttcctttagaggaggagaggcgctctgatttttagagtttccagtttttctgttctgttttttccccatctttgtggttttatctacttttggtctttgatgatggtgatgtacagatgggtttttggtgtggatgtcctttctgtttgttagttttccttctaacagacaggaccctcagctgcaggtctgttggagtaccctgcagtgtgaggtgtcagcctgcccctgctggagcctcccagttaggctgctcgggggtcaggggtcagagacccacttgaggaggcagtctgccagttctcagatctccagctgcgtgctgggagaaccactgctctcttgaaagctgtcagacagggacatttaagtctgcagaggttactgctgtctttttgtttgtctgtgccctgccctgcccccagagttggagcctacagaagcacgcaggcctccttgagctgtggtgggctccacccagttggagcttcccggctgctttgtttacctaagcaagcctggacaatggtgggcgcccctcccccagcctcgccgctgccttgcagtttgatctcagactgctgtgctagcaatcagcgagactccgtggggtaggaccctcccagccaggtgcgggatataatctcgtggtgtgctgttttttaagcccgtcggaaaagcgcagtattcgggtgggagtgacccgattctccaggtgccatccgtcacccctttctttgattaggaaagggaactccctgaccccttgcacttcccgagtgaggcaatgcctcgccctgcttcggcttgtgcacggtgcgcgcacccactgacctgcgcctactgtctggcactccctagtgagatgaacccagtacctcagatggaaatgcagaaatcacctgtcttctgcgtcgctcaggctgggagctgtagaccggagctgttcctattcggccatcttggctcctcctgttgtaaagattcataaagttgatagattttaaatccttggaactgtgccttgtatatggtgaagaatagaaaagtgccatctttcattattttcaccaatagtaataaagcacaattgtatagtaaacttgtaatatagtatatgctcaataaattgttaattaacttttgtgttcatttcctagtgcatatatatcactaagggaattgatactaatgtcattgcatgcattaatggtaacattaattatcttcttacacattgggcaaaaaaagaaaataccaggctgtcagaacatcttggcccagaaacctcccttcagcaaaaagacaaaaatgtgagtgaagagaatatgcctttgagaattgagagggttgcattttgcctattatgtatagagatttgccaatttccctttcacaaactatgacagtgacactgattctggatgagcaacctgcataatgcttcaggggcacatctcttcttctaaggctgcaggcttgccgatgagacagaacacagcctcaattccatctgctgtcatttatctgccaatatagatagcagatctctgtgggtcttggactgctcaaacgacacagtatattttagcaactgaaggggaaccacttgagatcactaaaggtggaaaacacctgatgacaccttcaatcgaaagaaatgagtatccaaaatctgaaacattaggccccacagtacaatggctctagtgacagataaaaaatactatttctaacccttatagaatgaacttgttttcaagagctcaaagaaaacttttatcacatttatcttccacttttaattaaaaagattatttctgaaatgctaaaacttttgttttattcatgttttagaggaaaggagaggaagagaaaccacctgttactttcttgatgctgtacctggcacctgcccttgattgaagatgagttttgcatggtgtctgaaccaaaaataacaagtcctttaaaaattattgtcctaaaaaccagcagatcaaactactttcttttttctcagaggattcacaaagtatattgtttggaaaggcaaagtcagtgaagaaaaaagaggaacgtccctaaatattggtgttgtcatttataatgtaagacttcactagaatgagattatctcaggtgtgaatggagaaaggtaggatgcatgcagtgtggaagcagccagattcaacacactaaaatcattaacacatatgtttgtgtagttgtgtgtaattttgagggggagaagaggaattttgcctttaattctcactccaaccacttgaccaataattgggaatcatctcttttatcccctatttttgccccttgttctatatgttatttttttgagatgttctttatcataaagtgcctttacgtaggcagtatataagcagtatgcaaaattgagtccccatctctggcattgatctcaaagtcctttttttgttgtcaaatacctttgaatctgtgtcttcaaactctgcttgggttcactcaaatcagtatatttctttccatatgtaggtcttttgatttttgtcctaggttgactctttcctgagttcccttttacatcagaaattaacattttcctaattatccagtctagaaattttagtcatcattactttttcttttcattcatttttaatatccaatccatcctcaggttcaattaatcctttcttcaaactctacttcccctgtctttcattcttcagctgagttcacatcacataggtcctcatccattcatgccaggacttcgacagcagatactaacaggcatcaacctccagactcgttaaattaatcctacacactatttccaggtgacttactgaaagtcttcatttgatcctgtcactctccctttcaggactcttccagcaggtcacaactcacatatctgcaggagccaggagctattcaaatggagaaggcagggggatcctgggcaaggagggtatagatatatcctcacctgcatgcgcagtgacttctgagctcctcacagttgttatcatgtgaaaatataggccagggttggcaggctttctgatttttcaagagaacacagaaattagacttttaaaaagttgattcaataaatatgacaaggtatattagggttctctggaagaacagaattaatggaatatatatatatatatatatagacacacacacatatatataaagggtagtttattaagtattaactcacgtaatcacaacgttccacaataggccatctgtaggctgagaagcaaggagagccagtccaagttccaaaactgaagaacttggagtccaatatttcagagaaggaagcatccagcatgggagaaagatgtaggctgggaggctaggccagtctttcttttcacatgtttctgcctgcttatattctagcagcgctggcagctaattagattgtgcccacccagattaagagtgggtctgcacactgactcaaatgttaatcttctttggcaacaccctcacagacacacccaggatcaatactttgtatccttccatccactcaagttcacactcaggattatcacagaaggcatactatgttctgagctttcttctctgtactgtaaaaaaaaatacagcagtgaatgaaacagacaaaaattctacccttgtggagtttatattccagctgggagtgaaagatgaaaataatttatatattatatatatatgtaatatatagaaatatatatttatttatatatctatatttaaaaatatgtatggggaagattttgtgataaataccatgaagaaaagtgtattagagaagaggttaacgaatgtgtgtgtggtgggtggtggaattttaagtggtgttaggaaagacctcattcagaaggtagcatgtgagcaaacatgaaggaggtacaaaaagtcctcctgccatcatggagggacagtaagaaggtcctggtggctggagtgaagtagcaaagtggagaataagggaaaaagttggagatgaaacagaaggggactcagagctctattcatcttactagtggctttgccttattaaacaaagacctttaaacagatgttaacaagatccctctgactcctaatttggagatgactttaggggaataagggaagaaagagagatcagtgagaagcagaattctttttttcagggtctttctcattgttgttctcactaccatcatcctttggacagacaggtactctttttaagtcaatttgatctaaatgtgggttttaaaaaaatccttttctttgtttaacagctgagacaaagcaggaattttaaagcaacactttactgacaaactatgtagaatcaaagtaacatgaaactagataatttgttctatcataggagatatcttattcaaatgaagtcccctaggagaaactcttcttctgactccctcttcacactggacagcagaggccatctttaactttcccacaagagagggctccacaagacatagtcattactcaagagattgagaatcaagacagagaagtttagtctcctcctatgcttacttaaggctcacctccttaactctgatttcctctctgggaaatctctattcctctggtgactgtatactgggatttagtacaacatttagggaagtgcaacctactcaaaatatccaaatatagcaccataattctaacactctaataagaggcacatccacgtattttcaagggtggggaaagatcattaaataacagtatgagttatattatgttctcagtaaatattagttaccttttcttcctcttggagtgacttttaccaccctctgtaactcatctagccttatctaatgggaggccattttattttgggatggcatgactacataatttcaagctatttcttatgttatttgccgcctcttaaatatcttccccttacctccttctcatacaaaccttaaagttcttcataagtcacaacaacttataaggtcttttacctaactgaaccgatgtcttctctttgctgtacatttacatgtctataacaatcatttttcatttaaatatgaaactcttggatataaaaatattaacttgaaaaatagtaaccctgatttgctctttatactttaacaccttttgtttctttgtttataaatccactgtgcaaagctgtttatgcagcagaaatttagtaaacattctgtgaatgtctgaaacatccattcatcaatccactcacacaaaaacattaacatatactttgtcatgcattgttagatgttcaagcatgaaaatcaaacagtagtgaagaataatttattgtaaatattatttttcagggaagagaacactttagaaataacttcttgagaaattggtttgggaaaatagtatatccaaaattagagagcgccatcttgtgggcaagtgagtatctcacacaaataataactattataagttgcaaaaatagaatttcttctctttttttcttacaattcaaatctcctttttactgtaaatatttgtattgatgcataataattatacatatttaggaggtacatgtgatattttgattcatgcatacaatgtgtgatgatcaaatcagggtatttaagataaccatcacctcaaacgattattattttttgtgttgggaacacttcagctcttccagatattttgaaatatacaataaattattgttagctatagtcacctttctgtgttatcgaacactagaacttatttcttctatctaactatatgcttgtacccattaactaacctcttttcatcccacctctctcttcccagcctctggtaaccatcattctactctctacctccaagagatccactgttttagctcccacatatgagtgacaacatgccatatctgtctttctgtgcctggctcatttcacttattgtaatgacctccagttccatcaaggacacttaggttgattccatatcttggctattgtgaatagtgctgcaataaacatgggggtgcaggtgtacttttaatatactgatttcctttcctttgaataaattcctagtggtgggattgctggatcatatgatagttttatttttagttttttgagaaacttccatactgttttctattatggctgtactaatatacattcccatcgtcagtgtataggagttctcttttcccagcacccttcccagcatcaaataaaatcttttaaagaggctctgtctgtcctagctgaagaactgaaaatatatattaaaattttatataattaatgatattttaaacaatccttagaaactaattgtaatatttacaatttacttttaaatttcttgaatagctaaaaatgaaggctcagcaaagaaattactaaatatcataaacatgacatacttttcataagaaagcttataaaactgttaatgaaaaaggagacagaattcttagagattatctctttaaggggtctatcactttttgggtatctcagggtgctttgaaaatttgactagatcaaatctctcttgaaaaatgtaaatgtacacacaatttttcatatagtttcaggggcttcaccaactcccctgcggttgactcatgaacccattcatgaacttcatattttaaatacttacattttacataatatacaattaaagtctagaaggtttgggggtaaaagctaaaatttgattccattatctcttcatccccaaaacctcatgctcacacaattttataagattgatatagatagatcaaatcatgatgaaatatatttgctacatcgtttgagttcctaagctaaatcttaaaacttatagtttctaggctattaatgttccttacatcaacaaaaataaatatttaatattaggttcatgtcattcatggtatatctgtcacaaatacccttgatgtccattctatccaaaataaaagatgttattatggatttccttctttttcagggctgggtagaattctagtgtgtgagtgtgtgtgtgtgtgtgtgtgtaccacattttctttatccattcattgttgatgaacacttaggttgattctgtatctttgctattgtaaataatgctataatgaacatgggagtgcaaatatctttttgacacactgatttcacttcctttggatatatacctagtagtgaaactgctggataatatggtagtactatttttagcttttaaagaacctcgatgctgttttccataatggctatgtgaatatacattcccaccaacagtgtaaacatcttcccttttctccacatccttgccatctttcatcttttttgtactaacaggtatgagttgatatctcattgtggttttagtttgcatttccttgattattaagtgatgttgaacatttttttcatatacctgttggccattggtatggcttcttttgagaaacatctgtttagatccttttcttgttttttaatcaagttatttgttttcatactattgacctttttgagttccttatatattttggaaatcctgtcatttgggatcacatggatgaatctggatgacgttatgttaagtgaaataagtcaggcacagaatgacaaccaccacatgatctcatttaaatgtgaaagctaaaaatgtcaaactcatagaaacagaataaaatggttgttaaccagggctgatgggtgggggctgaagactggggcaatgttagtcaaaggacacaaaatttcagttaaacaggaggaataagttccagagatctattgtacctcagggtgactatagttaacaacaatacattgcatacttgaaaatagctaaaagagtagatttttagtgatcttgccacaaaaaaagataagtttgtgaggtaatgtatatattaattagcttgatttagccacttcacaatgtatacatctatgtaaataaaatgttttacatcataaatatatacattcttatttgtcaatttttaaatatatatataccttttagaattacagcttagccttgggttaatgaagtcatgacagtacgaggtttataaaactgaacaaagaatcctaaccatacgccaccctaactatggaaatacaatggaactattagttttctgtttcctctttctttctcattgagaaatcatgtcccttcataaaatccatttctctgtgtcagatcattggagctctttttttctccattattatttataatagttagtcttattcatctcttgctagtatgaaccttagtaacctaggttagtatttcccaaagtaggttttgtggaatgctaatatcaacaggtactacctgcaaaatggttgcatggtcaaataagctgagcttcataaaattaaactgatatattactggaagctaaataaatattgtaaatatccaggaaggagatacataggcaaaatattccaaactttattaaatagttaactttttgtttgcttacagagtaatggggttgggtgctccacagagaacattatggcacatgctgaactagagataaaaaagatagatttaaaaatatatgcagattgcttggacaaatttcagcaggatagtgagaaattgatttctagtgtagaatattctgggaaatgagatttttttacattacgtgatcctaattcaaatattatgattaattttaagtaagcaggcaatttgatgtaatggagaaagcactcacctgaaacagagttaacatgttttattccttggtacagtcatgctggtttttaagtgtttagcaattcattttacctctccagctaaggtaaaggaattcttgtaggagtaatagaagccctgtgattagtataaaacttagattaagatgctttgtgcagcaattcccatggcatatttctttttgtcttttctctttctctttctttccctccctccctccctccctcccttcctcctgcgctgccctgcccttcttttctttttctttctttctttcttgacaaggtcctgctttgtgccccaggctggagtacctgggctcaagctatcctcccacctcagcctcccagaaatcctgggattgcagacatgagccaccatgcccaggcccaagtcatattctaaaacatggcttactctgatattaactgccgtctacaggggaatggtctaattactctgcaaatgctctccaccttctagaatagtcacattccaattagtatatttaaagctcttagaagtcacgtaataaaaagaaatattttctttaagattttgaagccatatttacaaattatttgactctctagtctttttcttgtttttattattcaactggactcttaacatctcaaaaactagtattcaatgtaacagtttggaaaatgttcttataccttttctacttttaatagataaaattgtttttaattcatgccaacagagatgaaccaacaatctaaaagaatggactcctaatcaattgtagtgaatggaccatatgttcatattatctgtaattaaatggaggaatttaaaaggaaaggtgtgagaatggaagagaaggctgcctccccacatcctatccaaggctcctgtttctacccgcacaccctaccacagaaatacccaagatttattttctagagaaatgttctcagaaagggtcaggactctgagagagaagatgtagcaccctgcagggatgaggtgtggggctgaaacaaggaatgaagggaatgtctgtggtgcagatctggttccctgagatactccgagatagatagagattgggatgcagggtgtttgtggggaaatgttctcagtgtgagcaccacaggaagaagagtaggaacagggttaaaggctcaatggaggcctcttctggttcagttggggtttctaaaacttagaggaaggggttaggactctatactatctccttcccgtttatcaaatagccattgtctgcagactgctctgtataaatgggtataatcttgggcaagagcagtataccctctactggagaaacacatgctgaggggattctgggcagtgcatttcaacatccagaagagtcagcatcatgaatgctgaaaccttgcctcctaccccaccctctacctaaaatgaaagtaatcagattaatgataaattacttaaaaaaatagatgctggagtacaatagagtaatggcttcaatattttgaaggaatttacatttcaacatagactcctttagcaagtcaaactatgaactagtgtaaagacagaataaagccatctttagtgatgcaagatccaaaaaatgtaaaatattaatactattcacttcatttgccacttgagcttctataaaatgtgacccacaaaaagcaggaagctatcaaaaaggaaatcatgagatccaataatcaacacgggaaataacagaaagaatgcttaggatgtcagatttctagcgggcctagaaagcaactagctgagaagtacagattgaagcaagagtacaaggtgttgaggaggaggctgaaaagagaaaatgaaattgatagattatccaatttgctagagcatctgagaggggtggcagatatgagtaccatttggaaaagaaccaaagcaattattaactactagcaaaacagaagttgagccgtaaagcaaatatgtatatattacatacatagtaaataagatttatatatagtaaaaatatgtaaacagtgattgttaatttaactaaaaattgtgatgtaactaggtgaaaaaagggaactggagatcagtataagataattaaatgtttattatgataagaaatgaatagataatggctaaaaaaatgaaaatcaagaaaaaaaaacccagtataagcatattacttagaattatagagttaattaccagcagaaacaaaatgacttgagaaagagcattcacaatgaatatatatagtatagttttgcagactgttttttgaataaggttttcagtataattttaaaattatatgtgcataatttctctatttatcctgatgggtgagttaaattgccctgacaacctctaaatcttgtaacaacaaagatgatagtgattgttgtttcccatactacatatcatcgacagggagctctgctgcacagcctcctcactctggtacagaaactgacagagttaccatcatggactttgttgatccttctggcagaaggagaaaggggaagagatggagagtctcacaccagcgaatcaacgcttggctgctgattggccagaattagtcacgtggctccattcaactacaagagggttattaagtgcatctacatgtgtcctgagggtggagagctacaaagagagagccagtatcgctaatggttgcctcaatttctctcataataattgttaagtaaaaataaaatagggcttggcgcagtggctcacgcctataatcctagcactttgggaggcccaggtgggaggattgctcgagtccaggagttcatgaccagcctgggtaacttggcaagacaccgtctcctcaaaaaataaaaaaaactaaaaaaataaaaaaatagccaggtgtggtggcatgggcctgtagtctcagctacttggaaagctgaggcaggaggattgcttgagtccaggaagttgagactgcagtgagccgtgtttgcaccactcgctcttcagtttgggtgacagagggagaccctatctcaaaacaaatacaaaaacaaaaacaaaaatggtttacttctagctaaaaatttaattaaaaattaaaaattcctatggataatcagcatgtaaatatttgtgtgataaatatgtaggtatataagcaaaatatgtatataaacaaatatacatatggattatatatgtataatttatatttttatatttggttttttcatatgtgtattattgagtccttaaacaaatgttttttgaatagcttctatttaccaggcattgttccaggttctgggtattcaatagtgaacaaaacagacacccctatttctgtgtagcttatatggagtggtagggacagagagactcagtaagcatagtaaataaatacattgtgtagcgtcttagaaggctctcagtgctagggaacaaatagtgcaatagcaggggagttcaatacagaggctgagaatatggttagaatttgcaatagggaaatcaggttagaaagggccctttgaggcaaggattgaaggggagtggggatagattcgtgggcaaatgggcagggaatgcaaatatcctgagactggagcaggcttgcgatttttccaggaatggctggaaggctagtgaggctgcagtgaggggacataagtgagatcgtgaatggggacataatagggggcatcatgtgaatatatgggatgtagagaccgtgctaaagactgccatactctcagttaattgattgaactctgagtgaaacacttgaatttacaccgggaaataaattgcccagcatctagaagatgattaatatttcatgtaaaccaacttggtcacactatgaagatggaaatgtaaaacttgttacttttctatccattattaattgcttaaagctcttccatgctttagataccgcactaagcatttatgtttcagcaaagtattggcataaaataaagcttacaggatggtgtgaaggcaatattttttgagtgtctacagcatgccacaaaatgacttcaatgcttagaataattgaattacataaatataatgtccccattttataggcgaaaatactgaggctcaacagacataaaatggcttgagttaccaggctacagtagaactaggatttcagtccaggtcagtctgaccccaaaaccttttcttttttcattgtttggatttagcacccccaaaaatgtcttgtaatgcagatttcctgggtccagggaattgtttaagtttttgttctaaaaactttcttatgaagcagattacatatggaaaatgaccctatggactatgagaattggcctttagagaatgtcactgccagccctgttggtatctataagaaccaataagcattatttacagagagtgatatacacagtgataattaagaaataactatatttatgatgacaattttgccaaatttactagaaaaaaataaaatatcctctgatttgagatttattgttcttttcttttgcaggtaagtttggaaattttttttgcttgtggaatagaggtatggtatcacttttttctgaattttattttaattgcttttaacattgagcacctttcataagtaatatgtttcaccacccattcggttgttgttgttgtatatatttggaaagtaacattgtgggtttgcgttatttgattcagaaattttacatatgtgattccatatggtaaatctatgcagtgtttgtatttgggtttgtgtttaaattatttctgtgtcaagtataaggaagaggattgtagtgcggggtctgtgtcagggaaatgggggactgtaaagaacagaggaaagaatatgcatgtaatgagaggttgaaaggctgagaagggcagctccaggcatgtaatctacaatggccatgaatgcatgtcatgaggaaaagatgccttttcaggaacaaaataatcaactgaaaactgttttcattcacttttctaagcccctagttttttgttttctcctattattgtgcaaaatttctggccagactattgctgacatgtacctttgaataaaaaaaatggctgtaactattctgaaacatgttaagttagaaagcaataaaatagatccacttcctggaaaaaagctcttattaactatatgtcaactatttcagataaggagtaggaagtttcagtaaagcttctagatacacaaaagagaggataaaatattagagggacttagaaagacrtgatatttgcactgaggaaagaaggtagcctgtaagttgaccacataggaccacggctttattattgtgcaccgtgctttcattagtatataaaagaggtgattgtgtgagatttaaatcaagcatgaacttaaactaaattccatattaattataaacggtatgtttactttattcaaaaaaagatatatgtttctcaaaataattgcaaatattattattaattatrtaaaaataaagaggaatgaggatactaatctactcacctaagttctagctaagagatgaggtagcaaaggaggaagaagttcttcagttcctggtcttgatgggtaaagcgatttgatctcattatattctctccaatataatcatattaatatcgaagtcatcagaacggagttgatattatcaagctaagtaaatattagaaaaataaaaattaacaaatggtttcactaaaactgcaaagtttgtacctgraccacaaagctaatggactggcctacaatggtctttgttttaactagtattccgggggttgatggaaagggagtggaattaaagggcattgtaaaatgtcatggcatccaatctaattatcagagctctagctccagggtcagcaaactttttctgtgacaagccagatagtaaatattttagccttttggggccacaagaactctgtagtaactactcaactctgctgttgcagagcaaatgcagttatctgtagacaatctgtaatgaatgagcataatatgttccaataaactttatttacaaaatgaaaaaaagtagtgggcaggatttgctctgtggtagttttccaacccctacctagctccctttgaaataaaaaaaaaaattaagtaaactttagagattttggaacaagatgtatgttggcccccttcagatacagataaacacttggtctaagaatgaaatgttgttcaactggagttcagaaacaagatatgaacttctcaaaagctttgatgaatttaaacactagagggcacaaaaggacatttttaagtcaaggacctcttgtaaacagaacactacaattatgagaaactgcctgaagtagagcgatgtgacctcaatgtgcataatttgtttgaaatgtcagcctgtagctcttgtgacctcactgaccacaaaaacttgaagtggttgaccaccttcatgttgctgtaataatagccacatgtctttcttctttttttcctacttctttctcacttctttctctctctyttttttttttttttttgattgcttttggccctttcataaaatatggccaaaattgaggatttatatgatgggattttttttcatttcctaatagtttttttaattgctttagattctaattttcatgtggtgagtcctatttgtagtaaataagttattttgaattatgttgtgtcaatcttttataaaatcataataaaataatgcatgttatttatgcatatgatttatgcatataataatgtatattgacagatgtcatctgttacattgatttatgaactaatttgaaagttttatttcagaaaaatgcttaaaaatcagcagaagcttgaagcctcaaaattactcctaccctttaacacatggacacaaagatggtaacagtagacactgaggattccaaaagccaggaggggaaaggggaataagggaggaaactctacctactgggtacaatgctcactacctgggtgatgggatcagcactgccccaaacctcagcatcacgcaatatactcatgtaacaaacctgtacatgtagcccctaaatctaaaataaacattgatatttttaaaatcctacctcttaatttagtaattctgcttgtagatatttggattgtggaagtaatttgggatattaaaatatttatattcaaagatattcaccrtaaaaatacctataatattgagaacctaggtatattstatgtatttcacatgaactaatgtttaaataaattttcatattagacccagccaatagaatcttgtcaaccattaaatatattttcaaatgacattaagtgatagagaaaatggcttatagtaaaccatgaatgcaaagcagaatccaaaaattatgtacatcraatctcaattgaatgttaaaattagatgcgtaaatatatgtatatacatataaaaataaagaaaatgagccagatttacaagttgcctctcggtatagatgatttttaaaaaaatttaattttctgaattttccaaatttctatcatgaatattcatcattcatatggtcataaaaaataagtattattcaaacagaaaactatttttgcattctgacagcacttttttaggtgtgattcttagatcagtggtgctaaaagtcagaaggttataaggaaattatttatgtatcaggcaatcaatttaaatgaattattgattgttacgcagacacatcattagagtcacttttttagccctgggatgggatgatttgtctcaggtttgggtgttgtggcttagttgccgtgcactaggcagtgaagaccaggaaggaacaagggcctgctggagaggcctgcagtgctgatattgaacatggacttccctgtaagctccctggactgtggtaaagcaggacacatcacacacacacacacacacacacaaacacacacacgtggacacacacactcatgctcctctatcctttttctcttctaaatctgctttctgcccttgcctttccctrtaaatggatgtgtgtggagaggagctggagagacagcaggggtctgaaggatgctaacttggactttttcctgagcaaagaattccttaagaatgacctggtataaaaattttgaagaaatctcataaataatatgggcaaaaatgtgacagcaatgtggcacaatgcaaaagcttgtcactagtttcagcccagcttttcctcgtgattgttttgagtagcatgaattatcctctaaaatgttggtttttattcctttttcattttgtacaaacatacctaaaagggtgaacatagtataagcaaagacacaacgttggaactataaggaataattttttcttaattcactatgtatttttctaacacttttcttggagcttttaatccttagaacctaggagatggaggactatacactcgggtttacttttctttcattttcttcttctgaattcttttttttaacttttaagttcaggggtacatgtgcaggtttgttatataggtaaacttgggtcacaggggcttcttgtacacattattttgtcacccaagtattaagcctactacctattagttttcctgatcctctccctcctcccaccttctaccctctggtaggccctagtgtgtgttgttcccctctttgtgtccatgtgttcacatcaattagctcccactaataagtgagaacatatggtatttggttttctgttcttgcattagtttgctaaagataatggcctccagctgtatccatgttcctgcaaaggacatgatctcattcttttttatggctgcagagtattccatggtgtgtatgcaccacatttttttttatccagtctatcattgatgggygtttaggttaattctatgtctttgctattgtgaatagtgctgcaatgatcatacacatgcctgtgtcattataatagaataatttctattcctttgggtatacacccagtaatgggattgctgggtcaaatggtatttcttttttaggtctttgaggaattgccacactgtcttctacaattgttgaactaatttacactcccaccaacagtgtataagttgactttttaatactagccattctgactggtgtgagatggtatttcattgtggttttgatttgcatttctctaatgatgagtgatgttgaagactttttcatatgattgttggctgcatgtatgtcttttgaaaagtgcctgttcatgtcctttgcccactttttaatggggttgttttttcttgtaaatttgtttaagttccttatagatgctagatattagacctttgttgaatagtttgcaaaaattttctcccattttataggctcactctgttgacagcttcctttcctgtgcaagagctctttagtttaattagatctcatttgtcaatttttgcctttgttgcaattggttttggtgtctttgtcatgacatattttttttttttttttgagatgggtgtctcactctgtcacccaggctggagtgcagtggcatgatctcagctcactgcaacctcctcctcctgggttcacgccgttctcctacctcagtctcctgagtagctgggactacaggcgcccgccaccacgcccagctgattttttgtatttttagtagagacagggtttcactgtgttagccatgatggtctcgatctcctgacctcgtgatctgcctgcctcagcctcccaaagtgctgggattacaggtgtgagccaccacacctggcctgtcaggacatcttcacctgttcctgtgtccaagatggtattgcctaggttgtcttctgggrtttttatagctttgggttttacatttaactatttaatacatcttgagttaagttttgtatatggtataaagaaggggtccaatcttctgcatatagttagccagctatctcagcatcatttattgaatagggaatcttttctccaatgcttgtttttgttaggtttgtcacagatcagatagttgtaggtatatggtcttattcctaggttctctatcctgttccatttgtctatgtgtctgtttttgtaccagtaccatgccgttttggttactgtggccctgtagtatagtttgaagttgggtggcatgatgcctctagctttgttctttttgctgaggattgccttagctattcgggctcttttttggttccatatgaattttaaaatagttttttctagttctgtgaagaatctcartggtaatttattaaaaatagcactgaatctataaattgcttcaggcagtatggccattttaacaatatggattctttctgtccatgatcatggaatgtttttctatttttttgtgtcgtctctcatttgtttgagcagtgttatgtagttctccttgtagagatttttcacctccctggttatctgtattcctaggtattttattctttttgtggtgattgtgaatgggattgcattcctgatttggctctcagcttgactattgttggtgtgtaggaatgctagttatttttgcacattaatttcatatcctgaaactttgctgaagttgtttatcagtttaagaagcttttgggctgagattatgtggttttctagatataggatcgtgtaatctgcaaactgggatagtttgacttcctctcttcctgtttgaatgtgctttatttctttctcttatctaactgccctagccaggacttccaaaatgttgaataggaaaggcgagagagggcatccttgtcttgtgcccattttcaatggtaatacttccagcttctgcccattcagtatgatgttgactgtgggtatatcattgatggctcttattttttgagggctgttccttcaatacctagtttattgagagtttttaacatgaagcgatcttgaattttatcaaaggcattttccacatcttttgagataatcatgtgttttttgtctttagttctgtttatgtgatgaatcacatttattgatttgcatatgttgaaccaaccttgcatctcaaggatgaagcctacttgattgtggtggataagctttttgatgtgatactggatttggtttgccagtattttatggaggattcttgcatcaatgttcatcaagaatattggtctgagttttaaatttttgtyatatttctaccaggtatttgtctcaggaagatgctggccttgtagaatgagttagggaggagtccatccttctcagttttggggaatagtttcagcaggaatggtaccatcycttctttgtacatctggtagaattcagctgtgaatcagtctggtcctggggtttttttggttggtaggctatttattactgactcaatttcagtgctttttattagtccattcagggattcagcttcttcctgattcagtcttgggagagtatgtatgtccaggaatttatccatttcttctagtttttctagtttatgtgcataaaggtgttcataatactctctgatggttgtttgtatttctgtggggtcagtggtaatatcccccttatcatttctgattgtgtttatttgaatcttctctcttttcttctttattaatctagctggtggtctatgtagtttattaattttttcaaaaaaagaacaactcctggattcactgatcttttgaatggttttctgtgtctcaatattcttcagttcagctctgattttggttatttcttgtcatctgctggctttggaatttatttgctcttggttctctagttcttttagttgtgatgttaggctgttgacttgagatctttctaactttttgatttgggcatttcatgctataaatgtctgtcctaacactgccttagctattttccagaggttctggtatgttgtatctttgttctcatttgtttcaaaaaccttattgatttctgcttttatttcattatttacccaaaaggcattcaggatttcaggagaaaaggcattcaatttccatgtaattgcatggttttgagtgaatttcttagccttagcttctaatttgattgcactctggtctgagagattgttcattattatttcagttcttttgcatttgctgagtagtgttttacttctgattatgtgatcaattttagagtatgtggcatgtggcaatgagaagaatgtatattctgttgttttkgggtggagacttctgtagatatctatcagatccatttgttccagtgctaagttcaagtcctgaatatcttaatttcctgtcttgatgatatatctaatattttcagtgatatgttaaagtctcctgctattattgtgtgggagtctaggtctctttggaggtctctaagaacttgctttatgaatctgagtgtttctctctgttgggtgtgtatatatttaggataattagatcttcttgttgaattgaaccctttaccatgatgtaatgcccttctttgtcttttttatctttgttggtttaaagtcttttttgtcagaaactaggattgcaacccctgcttttttctgtttttcatttgcttggtagattttcctccatccctttattttgagcctatgtgtatcattgcatgtgagatgggtctcttgaagacagcataccagtgagtctcgattctttatccagcttgccactctgtgtcttttaattgaggcatttagtccatttacatttaaggttaatattgttatgtgtgaatttgattctgtcatcatgatgttagctggttattttgcagacttgtttatatggttgttttatagagtcattggtctgtacacttcagtgtgtttttgtagtgtctggtaatggtctttcctttctatatttagtgtttctttcaggagttcttgtaaggcatgtctggtggtaacaaattccctcagtatttgcttgtctgaacaggatattatttccccttcacttatgatgcttagtttggccagatatgaaattgttggttggaatttctttttaagaattgtgaatattggccctcaatcttttctggcttgtagagtttctgctgagaggtccacagttagtctgatgggcttccttttgtaggtgaccttacctttctagctgcctttaacatgttttctttgatttcaaccttggagaatctaatgattgtgtgtcttggggatgaccttcttgtgaagtaccttaccaggagtttctgcatttcctgaatttaaatgttggcctctctaactaggttagggaagttctcatggataacactctgaaatatgttttccaagttggcttcattctcctcatgtatttcagggacaccaatgagtcgtagattcagtctctttacataatctcatatttctcggttttgttcattccttttcattctgttttctctattcttgtctgactgtcttattttagaaagccagttttcaagctctgagatttctgagattttttcctccacttaggctgttctgttattagtacttgtaattacattatgaaattctaataatgttttcagttctatcaggttggtgacattcttgtctatactggctgtttgtctgtcagttcctgcattgttttatcatgatttttagcttccttccrttgggtttcaacatactcctgtacttcaatgatcttcattccaatccatattttgaattctatttctgtcatttcagccatctcagcctggtttagaagcttgctttagaagggacrcggttgtttggaggaaaaaaggcactctggccttttgagttttcagggttcttgtgctgattctttctcatctttgtggacttttctacctttaatgtttgaggttgctgacatttgaatgttttttttttccttttatcctatttgatgaccttgagggtttgattgtggtattaggtggattcagctgattggcttcatttctggaagattttaggggtccaacactcagctcccaacttctggactgtgtgcactaactctgggggacttgtatgaggcccaaactttgtcttctcaytcttcaagttttggaatccactcagctaggggtgctgagatgggacagctgcagtgaagtgctagtgggtgtgggggtgcctgcctccttgcagatgttcaccagagtggcagaggcaatgcagcttacagaggtgggcaggaggcccttgctggagcctgtgtgcacagtcacactggaggtggtgttggctgggggtagggtggtggcaggcacaggtctgaatgccttctctgtgccccacaagcaggagtgatagctcagggtaggggaggattcactgttctctgtacagcccacgtgtttacttttcaaataatttgatgaactgagtgaaaatattgaatttagactagctgatttcattaaactatgcttaaaacttcaatttatacaatttttttcttcattttaaaactttgaaccaaattggcttgtaacataaactaatagattcaattagttatttggaattattttcaaagatgtgtccaacattctagagtttaaagtttatatcctcaaattacaattgcytgtaaagtttactggtttatttcctcaaatgatcattgctggtttatgtatatgaaatattctcaaacatatcaaggtacagataaagctatgagacacgtaagcttcttctgttgtccattgggtaggtagagaaatggatgacttggcttatttaagctaattactaaaggaaatagagaagccttgagtcctttctggaacaaaacagaattaaatattcattacatgagggaaagcataatttagaacaaaataatgaaatttccctggagtctgtcttctaagaggtttgatggattcatttaacatacatttatttcactcctactgtgctgggcagtcccagggttatacagccccaggaggttcagagtccagtagaacatgagcatataccactctttttctttacaatactcctttagagaaaagaagactgcagtttgcattttgccctgggtaagaaacaaattagagatgtaaagaaactttgctaagcactacagatgcctttgacgtgtttattcccgttgactcataactgtgtctcaccagataacctatagtatattcataccsaaacttatctttttctaatactttagttattagtttttaggtaacctgaagaagaatgaatatgagcttttcatatctatagtaggttcacttccaatccagagaaaccatggacagacctttttttcagctaaacaaagtgtggtagtttaacatcgcagtaagatcaaaaaccaccttaactgagtatgaaaaatatttgatgatacagtagtcttcaaactaagtttaaaagatgcaaatagtacatatatgccagtacatatgccagtgtcttgaatactgggaaaaaggaggattcgagtgggggaaagttcacgacattgtctctctgcctctaatctttcctgctcaagtccttgcaagtagaatcaaaatatcaattgttctgaaattaattctgcttttattatttcactcccttgttcagaraaacttggtaagttttcacttctaaatggaacaaaggtcccactcctaacgtatcattcaagttccttcacagtccagtctcaacctttctttcctttcttttcctaactatcattgttcataatacagtaatataccctcccaggagtattcaatcttttggcttccctgggccacattggaagaattgtcttgggccccatataaaatacaccaatatgatagctgatgagcaaaaacaaaacaaaaagtctcatgatgttttaagatagtttatgaatttgtgttgggccacattcaaagccatcctgggccatgtagcccacaagccacgggttggacaagcttacaggtctaaactctgataatttcactacaccttggatattcatacttctggtgagcmgaggctgcttacactttttataggccaatatcaatcataacgtttaagtgtttaataagtatcaatatttatctcatatggctctcagaacagtgaattaattcacttagcaaatatatattgaaccattaccactatctggccctattctagttgttggccaaacagcagtgaatcaacatgtctctcctctgaaagaatttaattttttgtggggaggatagtacaaaatatatgaaatacataaacacattcaaaatgtgtgtcgtgatggttagttctatgaaaaaaattagtgcagagtaaagaaatagtaatacgagtgtgattttagattaaaaagtcagaataggtatccctgtctgttaaactgacatttaaatcttaacaaaatgagtgaattatgcatttttccaaaggaagagtgtttcaagaaaaagaaatagcaagtgcaaagctccttaggaggaggcacattgtgtttaaggaacaggaagaagttgagtattgtgggaactgagtaagcaagaaagagaatagaaaaggaggccataaagagaggagagggcttttgaaaaccatggaaaagagtttggattttatcccaaatggagagggaaactagtaaagggttttgagcagagaaatggcatacattttcaaaggatcactctgggtgctctgtgaagaatagagtaggagcaagagtagaagcagggaaaatggttatgacgccactgcaatagccttggaaggagacagtagtgacttggaccygggtgatggcagtggagatggcgagaagtgatcagattctggcaatgttttgaaaccagagctaattgtgtttgatgacggatttttacatagagtgagagaaaaagagatgagtcaaagataattcaagggtttttggcctgaacaaattggaaatgtgtgtttttatttattgagcttgaggagttcaagggaggagtaggtttagtggtggggtggttctgtttgagcattttgagtttgatagtcctgtttgtggaaaatgcttggagtgctgccccatttccctccacccactatagagttcacctgaggctatggcagactcagtcagtttcccatctcaggcacctgggggctttctgcagtacaaaggagcctgctgagaccgtttacagaattttttaacattcccagtggcaacactccaacattgagggtccagagttggtgctcatataccccaggttccacattctccagtgggacagtcctgaggcatgtgtatatatggtcccacaaaaggtccctggggagattgggccccatctgcccctgcttattaatacacactgtattaacttttcttcctttgctatcccacttctccatcacctaactttgatttcctagaatcgccttcctgcctcttctccaaataaactacgcactccaatattttgcagtctccctggaaggaattaaacctaagactattaaatacccatatgtcaatctccaagaaggagattgatatactattctgaaaaccaggcaaaatgtcagggatggagatacagttgggaggcgttagtctttttcacaagcctattcaaaagcccattgcacaagcactagatatgtgtagattcctacacagacttgttaccgtccttgtctgcctcatgtcatctcttccacatgaatacaatgatactcatcaatgaatgctctgaactttcagcaaaggccacagtagaatttctagatagtagtagattgagaagtgatgacaatttgattggaagctaagggatcttggggacttgtcttgaatttgcatttacatagaaagcacatcgtttttatgtttgayacatatttatttgtggtgggtttggaaaaccttgtagcggttatggaggggcaccccaacccatcctttggtgttgccattgctttttaattatgatttgtgctaagccacacattctcattttacctagctcagggttctaagcatgtttttcatgatggtttggttaggaaagtgagtagcaatgaatgagctcctcaataaatacatagcacagacactgacaggcaaagtgaagtttgtaatcacttcccaatcaattgttcaactgaatgtgagaagaaatcattttctctcctgttttgagtcagaatatcacataaagcacaactcttcctgcatacattgtatcatattccacagtaatttacttttttgcaagaagtatccaaaatttggtttttcctgctgagcagttatccagataattgcaaatcagtggaatcatttacatgaataaagatttttattctaattaacgtgctaaatcaagcacaccaaatgtctctaattcttatattactcaaatggcaatatttttgtcagtgactatcatatgaaatttcaggtgcctaatgcattttcaaatggcactcataagcatactaacgttttataaataaatgtctccatatttttaagatgaatggacaatttttgatttttaatrtagtccccaattttcaatttttcaattttcatttaccgaatggagaaacagcattcatcagagcaaaagagcaagtttcacaagtcatgggaacaaacatagatgctaatttcctattttaggaagttctttttaaagtattatcattaagaagcacaactctgtggaatatttatgtgcacatttaataatagagaattcggatgtcaagtctgtgtgttactcatacccatacatgcatcctcaaaaagccttggaagttaatcctcagctgatgaaagctaagcaattgctctggaaggatacttgaagtttttggctcttggggtgaaggtacagtcacgaaaacctctcttcacaagagggcgctgtgcaaacagctagctcctcgtgaaggaaaattgccttgcagactggcacgaagtggatttctttacatctattaagtgctctgctcttcataaaggaaaatttccttgcaaactggcacgaagtggatttctttacatctactaagagctctgcttctttctctctctcttgctttttccttgccatgcctcttcttaggctctgtaaggcagacttcttgtcttctctagttatgcttctgcaaactgcatcatgctgattctattaatgatttgattttaaataataccatcataggtgttaaatgatgtgtatgcctatctggcttctcaggacttctctctcactactttacatctcaccaatgtgtaaaatatctatgagacatctttaatttaatatgattcaaaagtctttactcttgacctttgtttgaagtctaatcaactaaaaacctaaaattcctggtgggaaaaaaagaaacttgactactctagttttttaataacatgtatttcatttattctgattataaaagtcatctttatttattgtagaaaatataaacattatggaaaataaaatttaaaaacatctatcattctattacccagaaataacttgatcaacattttggtgcatattttaatgaatagatttttaaatgagaaatgcttttcaggagtaattagattctacttagtattgacaattttataatatgcttttaaacaaagtattaacattaacttttttggaaaatgccactttctgctacttatagctgtattggctattttctcagaacttctgctgtaatgagtttatactagagttgcaaatacacgttctttgaatgtacttgaggagtcgatagtctgaatctgagattttccacagctcttggagcacctgagaacacactagcttcttccacgattctgcagtacttgctccttcctgataggatgcctttgtaagcgtacaactccaaacatgggctgagtgttcagtaatcatttgtgttgagttcttcagtttcatggagactaaaattaggttttctctgtcactcttgtaatgtcatctgaccttgacctgcatttcaaattgctgagaagttagcaagctgacttttacactaggcacatcagaaataattgattaaaaatagagttattgaagttgaatttttttcatttatagaaaagtacaatgtcttgttcatgacaaacaaggcctaacatttatataatgttcatttaaaatatatcaaaagaaaacaaaataataaaacccacagaaaacccaaaaacaactcacctattaaaacatctcttgatttataaatattatagtttagtttgtacaatatcagtaactgtggaaagctcccaattatctcattcccaagtgcttgactgactcataacttaccaacaattttcttatttcagagaatcccaaaaacatattacctaggactaacctggaataaaacttcatggttgatagcttttatcaattaaatgggtattgatttkgataactcataatcttgagcatatctttagatttactttttatcctgaatttatttttgttagtaagatttagaaattcagatttattttgtgctttatatgacatagaaaaaaacaaattgtctttcctgtacaaagtccacccttcaaaatagactccagaagaaaacatagagacttataacttaggttaaacataggcacaatcctaaatagtattcagatgagtcttacctgaataattgctcacctaatatgataatcacctgttaagaagcagtttcttaaatgtcactgttggaatctaaacagtagatacacaggtgttcactgtaaacttgtttcaatttttctgtatttttgaaaatgttcataataccatcttggggggaaaaagcctctttttgacatggcaagaaccatattctactgaaacagatcttatatgctctatcaagtttatattttagacatccctaattcagctcattctggactattccaggactgattgccctactaaggcatgcttatttttttctttatgtgtataagaaggattcaaagggaccgtttgtcagttttaatgtgtgagcactactgatatgttttattgagaaaaagcttactgccacagatcacagagatatttttccgaggtaagattcttgctggtttgcaagttttgtaaggaggcaccaggacccatctctgtacccccagccacggagcccttatttagacccacactgggctgaaatagaaacttctgtacaaatgtatctctcctgtgctctttccactttaacagaatagaaagaattgactggttgagcccaaatatttcccccaggccagwgttacaaactggcgtttcaccaaaaataactcatttgatatgtttttaatgttgatgatctgaaaaatcatcttcttgtttttgtttgtttgtttgtttttagagatagggtcttactctgtcagccaggctggagtgctggagttcagtggcacactcacaactcactgcagcctcgattcccaggttcaggtgattctcccacctcggcctcccaagtagctaggaccccaggcatgcaccaccatgcctggctaacttttctcttttttgtagagatgggatctagccatgtttcccaggctggtctccaactcctgggctcaagagatctgtccgccttggcctcccaaagtgctgggattacaggcatgagcttcatacctggctaccttcttcttaattatatacattttttcttaaataagagctcatgttattttttatttctataaatattttatattccttctcttcttattgccctgatactttaaataaacctaagcccagtcaaattttgtattacccttgagtttcagtttttggttcattcagccctaagttctctttgggcatgaattgttttcaccattgactactagcaggcagctggcatagcctgggacatgtgaggtgatgctaaacatgcatttgtgagtagaaggaaggaagaaaggagggaaggaaggaaggaaggtaggtaggaaggaaggaaggaaggtaggtgggtgggcaagagagagggaggaagaaaaaaaggaagggaggctggttggtttgattagctgttgaacaaaattccatatagaaagtagcttactagtctatatcttttagctctgtttatttcaaagctttgtgtgtttttgttagggtcacttatagaatatttagaaaaatacttgctgcctcatgcatttcaccatccagtgcctggtgagacctaaaagcccatagttataattttgtttctttgaccaaagtttgttttattttcaaatataaattcaatcccttaagactcacctatagcatatatatcaaacaaaaacacgtcaaatttaactcagaattttgctggataaatgattttactggatatcatctgaccaatgaaataacaattgtgtgttctcaaatttacttctacatttttaaggtagtaagtttaattaaaaatctctaatataaaaatggcttattctctaaaatttagaggtaagctaaagttttcatcaaggccccattatttagcactttccaaacttgggaaggtcacttaactccactgaaccagtagaaataaaattagtggtaacactgaaagcaaaaaccagaaccagtccaattgtcttattaataatagcctaattgtgtaaatgtctgttataaatttcttagctggttctgagagatagctagtaaatggcaccctaagttttatatattctgttacaaaacaaaaacaaataacaacaataagctgttttcttttgctgttactcaaacatctggatttctattgtagcccctagcacattgttacctttggttggatggactgaaaagtgttgtgatttttctcctatgtagaatattcagagggaaagtgcagggcagtgcacaatgcatacaaacattgacaggatcacttttcctcaagctgaactatactctaggcctcctctctctctagttaccacagttgaacccactcagcccctacttgcagcctcagtcccaccccaggctcacaggccaattttgtcctggaattaggaattgaaagatctcaggtaagccagccacaatggagacaagatttagagataagcaaaactgacttggactcacatgtctgtcatatattacctctgtggtgttagccaagttccttaacctctatgagtctcagatttctcatctataaagtggtgataataatgtctgctcgtgagttggaagattaagtaacatgtagatcttatacctgacaccaattgtttttcctgtgaaagttcaaaacttctcttatgatttaattcttcaaggaaggtgacctgacctttttcattcctgtatttacttatattccaggcatgtattggttaagatatacattttgcaattaagagggacctcaattttaacctcagatctgctactcattggctgtatgatcataggggcaagttacttcaacttcgtaagtcttcgtttcctcagtggtgatacagaataaaaataacacaaagcacacagataaattattatgaggataatatatagtataccctaaaattctgtgcagagtcttcagaacactttcatgttagttaccctattcagtcctctcaaaagctctttgcaatggctctctctcaaatgagaaccaaatggataagacattataactcagcaaggtcaataaacaccacagaataaacaccaaataagtggttgatatcatcatagtaaaatgaggaattagaaaagttaacccgacattatggtgatgtttggttcacaaactcattcagtgcacaggaagtgtccaagtaaggaaggggtctgaggatgacaggtactcaggaatgggaaagtttatgactgttggctccaacaaatggataaccagatttagcaagatattgaacagtcacggaaaaaatccacagcaccaaaatttagcacatgagatttttatttagggattcttggtattgggggtcttttttctttctcccaagggagtgattttgtttctcagcctagcaatttcatcactgcttttgcttatttgtaagcataattctaaaaagttgtaagaagccatttctgtccttatttggtacgtggccaacaataagggtagcatgagttggagtcagtgttgcaactggtttcccaattaaacaacctgtctctaggatcccataagttttcaaaaaataagtagaaacatttctatatttaggagaagcttagggttttgagcaatcgagaaattctatcacctaatttttgtaaaatttcttgccacctaattttttttagatcttgtaaacaaagttcttagagggttttaatgctgcaaataaaacattaacatttcttcatatgattaaccttcaagatataacagctaatattttattcttacacacatgggatataaagatttcaaatagagaaaagtgttatctatcaaaactgaggactgatattctttttgaaactgataaartggtatgcctatttaccatgctcatgaagtaaccaattggcaatttttagaacttaaagatgtttctaacagtataaaaatagttttcctacctctcccaaaagcttacaaacatcagtagtgtgtgcctaaaattttgtccagttttcagaatgtttttatataaattgccttattcagccctctccaaaactctttgcaatggctctcaaatgagaaccaaatgggtaagacactgaaactcagcaaggtcaggcaacaatcttcaaggtcacatggcaagttcatggcataactgtgactctaatctctaatcccctatacagtgctgccctgaaaacttgcccaatggtattttgattaaaaaaattaattaatcaatcaaataggaaaaagaaactaaataagccctacctaaattacctgttctgaaatttctgcccctatttaggcacatataagaatataatgtaaatgctccatcttatttttaagatgccctgaaaatattggtttgtccatttattaaacaaacataattgtggtttttatgtctctagactgtttgctaagcactgagtacccagagggaaagcagatgttatccatgttctcatagtgtttaggtctatcaggggagccagataccaaataagtcattactaatgtgatgacattgacaaagaggaagtacaaagtgcagtggagacctcacctggtatggggaggcagggaagacttccggaggaagtgaatttcaagatgtaatcctatatccaccactccttcactcaccagtcaatagctaagtaggatttttatttaagactgtattcatgagtagaatattaaatagaaagaatttttatgacttttaaaatcttcatatacagagaattgaacaagacaatcagtgacaccagaagacttttacacacttgttagaaaattgtgtcaaattatttatttcaaatgattagtctacattgatttcaagatttttaaagaatttgagtctagaaatattttttgaatagttagaaaaatctcttaggaacttgtcagtcatttagtagatattcaataaacataaaatttattttcttttccttccatttcttcctccatgatttctttccttcaatcccatttatccaagtaggctttatccaacaaagctttagaaggagctttgttagtttagtgaatagaaaagcttgacttagttgttttccaaattgctaaaaaaaatcctaaaattaatgtagatggaaaccttaagtgtctagtaaaacattttgattcacaatcatagtcatattgattttttatcattatatttaagcatgcctcttattgattgttttagtctatatcctgattttagctctttaattacagtttgtgtctgtttgtgtcctgggtcatatatgagtaatggatgcaattgtagaagcttaaaacacagagcatgctttcccagtgttcttaagaccatggggtaccttcaattctgttaatgttttactgttgccaagtcttaaaataattgtctcccatttcagaacatggaataattgacctttcratcaagtagactcatataaggtttagaatgaatatttgaaagcaattcaaagaaaattttggtattattttgcaacacttccattttgagaaataacttatagttgattttgataagtaatgtaataaaaatcattttttacatttacttgtactgaatggatattagttttaaggagtacacaagccccgttatcaaactgccttttgtcacactcttttgcaatgyatcattctgaagatagaattacaacgacaccctcatcagaagtagatggtaaataacagtctgttatttgcttccrcattaacttctgctggctttgagtctgtaaccagagactatttcaaaatacagcactatcctgaaacccactatctgcctgctctggtttcctgaagcaatgtctttcaacctaacgcaaccccactgatgtaactgcttatttctctgaagttcagctcaaccctcgtctcttccgtatgcctgttaactagagacttgatgcgcaagtaattgaatgcctatgtggattacgtttaacttatcccactctcaaatttgggagtttcatttttattcatagtagctatctcctataaaggaaattctgagtttctgtgtcagacaccgaaacccaaatttgccatttgtaacatctggaatcttggaaccaaaatcccagaaatattcaagaggcaaaaamgatgccttatttagagctctgcagaacataagagctaagttattggcaggagacgggcactttgctgatactttagtggggttaggacttacatggataacaattggattggagcaatgtttagatttccgaatctggttttccctaggacatataaaattagtgtgcacaacttgtaaacataataatttgtctcagggatggaacatctctccttgctattgaatcatgcttttactaaaattcatctggaaaaataaacgcttaataaatgacagtaattagaatgttcaaaagatgtcttctttgttcttttatactctttgatacccatgaagtaaaaattataaacagcttgttgtattataaatgctagtaaagattcatcctagaaaatcattttatttaatttcttattttttccaaatgtctaaattctcatgtctgtgaaatattagccagttcttcaaaaacaatattgatatttctatttgaaatcaaggcttaattttgctcatgattaatctcagaaataagtagcttatttctatgaccttactgagacctggtaacctaagaaggattatgtgtaactgtgtggaagaaatgaaaaggaggcggtaagtaattatttaagaaaaaataatattaatattgacagacacttcttgtgtctgtaactgatttcacactaggaaaatgaagcagagtttcaattttcttgttcataatttcacatttacagttccattgttttatcttgcttaactgttctagatgactgcctttacaaagcagggggaaaagaaggaagaaatgtttttgacagtaatgaaaaagacaagattagttctccttccttgcacatttttagaaaaagttggacattccctagcagattcattctagattattcgtatgtccttgtagcttatcaattagatatccattaaatttgaatatccctttaaaaaggtaaatttgtaagcaaaggcagttaattatttgtgaaaatgtatactgctggctttagcctgaatacaaagatagggtttatcttgctatcagtaaaattgggataacaatgaaaatatttttctgcttccaaagtcgtatacataaactgtagcttttattagaaatcagtgatgctgtttcacctacaaaaatttaaacaccactggacaaaatgagagctttgtgttgcctggagggtgaaaaaagtccatctttgccagcaacatcccttctactcttctgcttgtctttgtggcctccctccccctccctttcacaccaagccacctcaccccaccagctgttagggactcctcccctctttacgcagatcaccagttatcttacactgtctggctttagtctcagatgaagacattctaataagcaccaagttgttcagctcagtgctaactctgccaggaatgtgtgcatttcctaagagctgccgaaaatggaaattaaatagtttgaaagaattaaatgataatggtggcatttcatacaccagaagggcagattggcatcagtgtaagcaccttttcagtccttctttgagaacaccaggaaagtggctacctgttttgctcatgcgaaatttggatctctatacaaaagcaaaaagacagtttgtgaagcgttacaatattgcaagttgattcagrgagaatgtgttgtgtttatttttgaactctctgctcctccaaggttgctgctgttcagggcagttctcactcacccactttctttgagctcatgtctgataagaaagaggtgaaactgtaaaaaccttttctattactcgtctccaaagctgatatgaaacctgtagcattcttaagaacccctggtgtcctggatgctgttgtgaaaacaagcataatgtttaatgtcttgagcttttattgaaattatatgaatattcaagactcccttggtgtacaagagacagattgagctttagaggtctcaaaatttgcagatatggtgatgttcactgagctcaactcttggtcaattttgtccagttcagagagggttaaattcactcttgggcacttgaagcctctctaatcttatcctgaagaagtggcgctctcccttggtttacagttgaggtcacccgcggggcagtgtttggatacagactgatgaaattatgctgcattgttaacattgaataccactcagtggtgaggaccgatgacggcactagggtcctttgactccttgggtacaatttcttgaaatagatgctttcccaaaatgtcctggactcataaaatatatgaaggattctatttggctttcatcatttatttaatttgaaagaaagttgttttaacagatttatcagagttaagaaatgtttctagggaatagaaaatggacaagataattgatctttgttgtcagagtcatgcattgtaattcactctctaaggtgacgcagcatctccttgagggcaaagctgccaaaagttctgaaagtgatctgcctgtttttttttctcacactgacttttagagaggcgctggtattttcaagacgagtaaatcctgtttacatcctgtggaaggttggctaagaattatatccatctctttttaagagaagttgaaataaggaaaattatagttggcagttagctgtgtgaaatttagtaatctttgtcagatgasccagtcataggcatgtattttttaaaattttttaacgaagccctgtgggtttacattttttaaagttcacactgatataaaggtttacccacttcaatcacaccttttgttgtgtgtgcatgcgtgtgtgtgtgttgtgcttttcaggagtggcatgtgactatgctgtttaatcagggctatatttaaaaacaaattttcgagggagtgtttctcacgttaattatgagataaggcctgagtgaagcaaactctgtcgcaaaggccaagtgtcatgcagcaggaagtcctggccatcccttccagccctgcctcagccagcctgccatctctctgtcagcgcataccactgcacaaaggaaatgccctcactcagctacaagtgcctcctgctccgtgcggggcctcagggccccagagccccgcaccagctctgacttctcgtggttcctggggatcttggcatcgtccttaaaaatggcttttgtttgggatcctctgggagccacggtgccaggaccatctacaagagccaaatcaagattgcgtttctcaaagtcctacaggtattactcttttccttttgtagctaggaagaattgtttaactgccttaggccccttgcaaataagcctttgccctatgttgaccttctaactcctaatgcttgttaaattgacaatatattaaataagagccaagaagatgatgtaaaccttgaaataggggtatgtaggtacgtgcagaagttgaaggaagttgactaactttaaaagctaattctgagagttaaatggcaaacttaacaaagcattcatattactgccacctgaaaaacagtgtattaacttgtctaatggcttaatacagtcaactctaaatgttagggaagggttcttgtttgaccaacaaaaaaaacactacattattcttcataagtgtttcagggcacatgcacatgaaaaaatggaaactaatgctgtttcaggtagtaattcagtgttcatcttgcccagcmgaattacatgtcatgaattcaaactaaatattttaataatcttttgtttctggaagtcatattaaaaatcttgacctcatgacttcactaaactgtcaatgactgttttacaacaaaatcagcttattttaaccaaataactggaaagaaagaaaacacttaaaaaatattggatttccttcttcatttgagtattctaggtgttaataaagagaagattgattattctttattattgtttagaaagaaaaccttttctgtttttgattgattacaatctatagcactgaaaggtatctatttaatcaatagtaaatagaagtgacattgtttgcaaaattttggatataaggtctttcttatttagaccaaatgcagcacatctggaagctgccaagcctatgtagaaatatatattaacactgaattaaaatgtgttctgatttgcctgcatataaaacattcaaagtttgaattaaaataatttataaggattaattatttgctttagacactaaagaagataatgtccttggaatttttagggaactataaaatcagagaaatcaaatttaaaaattttgtataacaatgcataagcaaactttggcaagaggtaaatataatttgccagctaaaggtataggtattaactccatttatttttatttcaaaataaaataatgatttatttgttatgtttgttacagctataaaatttagttgaaaattttaaattatatgcttcctatgtgctttgcattttgttaaatgtgattctcatgcttattgtatgctaaattgtacatttagaacttaacatcaatgatttgctaacattactgtgcatatttccaacatatggtggcttctaggctctcttcatcactagatctgataacaagctccttaatatcataaatctccagctgctgaataaagtaaaagcaatagcttgattgactaatgaatttgagaaatctcacgaaatgcagagtttaagctcttctgtgtagtttgcaaatatattataaaccttgccttctcaatttggcaaagatatttttattttgaggtgttatggtattgtaacaatttaaagctatatgataaatatattttttcaaggttcctttggtcaagttctgaccctttccaaaatataagcattagcagctaagaatgactttttcatgtayttgaatacctcacatctgtaattttaacaagtttcatttgtaacaagtttaagaggtgagaatgacatctcaaatatccatcatgagtcagtttccttcggaagcttgagaggctcagtccttcctttacttcctcttaatttgaatatacartttcccacagaataattaatttttttatatgtgctgctttcactgtttggaggttctagtttatctttccagttgcactgcaaactctttgaggttagaagtttccttacatacagcaaaaatgccagtaatgcctatttgataaagtattctgttaccctttcttatttggcatcacccgataatgttttattggcatagccaacttgatatgatcatatctatcataagttgaattgagtggaagggttagggaggtaggaaggcagttggccactggctcttgcatttctgcaggtccctcatgtatccaaaggagattacgcattcagccacgacaatgtactgacaataatgaaaaaaggtacatatcatataacttaaaatttttatcataccataatacctcaaatgcaccatgagtcactctatatatatacagacacatatacacaccacacacaggcacatgcacgcacagttaaatgctataattatcttctgaagagcatagttttattgcatagcattcttggaattaaaggtgttaaactatttgatgtaaacatgtaaaatatctcataatgtcacagccttgtttttgcatttcttattttttaaaaaatatacaaaatccttacgcggtgaaagtaacttaagcttatcttgacctttaagaggctttggatctgattccattattgaagcaactgaaagaactggacattggacaacatttcttcattgaatttctcccttataattttttttatgagcaatattttttatcttgtaaaatcttcaaatgtgcctattgtagtgtcatttttctttggctattgaatggataataatgcatgctactgggggtacacttagctttaactggaatatttttccttggcatggcttttgctgcctggtaatattcaggctaaaggaaagccaggtgtacaagatatgaaattcaattagtgtctgatttgttaaagtaatagcaaatcatatacatttaatgagtgttgactcttgagaaatacaatctgaaacagttttacaatgctcaaaatagatgtgaaagtttttcagctgtgacaattttttatcttatgtgggtaaaatacatttttataagaaaagattaatatatagcttattaagtttgattgaggcagaaagaaggattgaaagagaaaagaagagggagagggaaggaaaggcaggggagaggaggggagcagggccgtggaaggaggagtgaggaagagaaaaagagagaaagcagagggttacataataaggaaggtactttttctctgtgagcccagaagagattgccaaccatgttttcagtaatgggatcagtgttagcattagggcaccacttacaaagatgagtactaattttgagggcaaggtgctgatttatctgcctaggttctggcacacatgtttaaagattcacctaattactttagagcaacgcccctcccaagtattatagagaagaaagaggagaatgatgtgctcaagaaaacaatgtggagaagtttatattggttgtttaaacatagtacctaaaaaaaaaaaaatggggaaaaacgatctgggaagtaaagaaagaatcaaggagcaaagatttagcaagcctgtggaccctgacaactccaataagagaacactagggaattttgtgatttaaaatatattattgcttaaaactacagtagtgttcaaggaaactttaaatagaaaattactcttcttgagatgattctgtcttccaaagagaacaaatcacaaggatgttaaaaggaacattttatgtgacaagtttggggtaggtactatgtaaatagaagagaaagtcactcaaggtacatttgaatgtagggcagagattattccatagcattccacaggccagaaacagaaagtgtcttctagttttcttgccctttatagtaataggggtcatgggatagaaattctcagaaaatctccaaatctcatttttgccaattgtttcaacatcttttccttcccagcattttagcagagctgccaaacaggtgattaattaaatacatatgtgcatgcttgtacctcgtgtagaaggtctaatgagtaaatttatttgatatgacatagactgaacagtagaaggaaggattaatgacagtcagatcaacaaacaaaagtacaaatggtatctgggctatgaaaagataaagcaatatttgcccaaacaagaagatctagatatccctaaattacctcctatattattaggaagtaaagaccaaatctacaactttgatctggaaattgtatagtagctgatatgaacagggatcataggagagtgtggtctcatagctactctttgctactaccaaaacctgagtggtagcacatcagtgattgcccaaccaaactgcacaattcccattagaaaaagctgtctcaaacccacatcttagaaaggaagtgaatgccaccagtgaatcaatacactgggatgtaactttctgcataccccaagaatacctcctgttgcatagcactttttagttttcaaagcttttcagatgtaacagatgtgacagctgttgtttttagtgtgccacagctcatctcacttaattctttagggtaagtgaaaaagatgagtgtaattagtatcaaataagagaagaagaattgaaggttcagggactagagaccacacatatatgtggttagaaagtccaaagtaagaacagtagagctagtttgtattggacacttactatgcaccaggaaccattcccaatcccatacatgcattagctcatgcatgtcatcctccaaaacagcctcgggaggtggatctagcattacctttatcttacaaatgaggaaaccaggcagagcaagtttaagaaacctgcacaggtgtgaattctggaagtctgtgttagaaccaggactcctggtccctctcccacctccagcttcctcaccagatcctattatcagcacacaaggaaaaaaattccataatgagaggtattgttctaacagatgtactatcttcctctacttaactctgaatttttctctgaagacagaacaccacgtaatttgttatagaatagggcttagtaatcagttaaaatataaacttgttaaataatatctaaactgtcctctaacctaattgatgttggtttaaagaaatgctaagcaaaagcatcaaaatagaggtatttttatattaaaaagaagaaaaaggaaaatgaatccgttattttatattgtctgcttctgccccctcctggcttttgcttcatgggcttccatctggctcatttcatctggccaaaaacattggtcatgtggttgtattttactgccaaatattactccttggccagctgttcagaggagccagaagattctctgagctmgagaggtcaactccatcctgtgtcatgtctatttattctactggcatagtcttgactattaaactaggtttcttaatgatatttcaaattgtgagtaatgttggctaaattgacaaaaagaaattatagacaacatttatatctaagaataacaatactactaacaaccattgcacattgtaggaagaggtagcatggtataggaggagaactttggctctagagccaaacagacccagcttcagtgccaactctgctgctttcttgattgggcaggtttcctaacctctctgagccatttccatgtacataaatagaaaattaaaatatctacttcataaggtcgttgtgcagattagatgaaagcatgtacgtgaatgcaggactacctgccaactctttcatagcattttccaagtcttcactaacatttcacaaattttgtgaagcttcttttgtgaaatacattttcagataaactatcatcattggtaccactcttggtcacagaatagtacaatagagctggcttataaatggttaccttataagcaacttgcacatacaacccaggctcaccttggaaatgtagtgtgcaggaatgattgacagctggctagctctacagccacactgctgctgaggttcacattttcacattatcacttatagctatgagactttgggcaagttacttcatgtgcctcagtttcctcatttgtaaaatggagtattatgaggattaagtgtgttagccatgtaaagtgcctggcacatagacaacactaaaataaatgtcagctattattaataatagaatgtaagctccacatggcagcaatttttgtccttttttccacctttgtatggccagtgcctggaagagtgtgtggtacatattaggtgcttggcgtttgtgtattgaatgaatgaacctattagcaaatgtgttccgattcatggcaagtgtgaggatactctgcttccttttgccacattcatgggaagagggggttagagctgaaggaacctgatggttcatttgttcaaactcatttgtcttacattgaagagcttgaagaccttgaaaggccccagggtcatgcaacttgatagcggcctggtcagagctagaaccctggctctgtgtgcttctgtgaaaatctttgttccaatgtcccacccctcacttcaatacatatgccatctaattcartgctttcagtaaggcagcaaaatgaatgaatgattcagagcacacttcttgcagacaggagagtgtataagagccataattgggcaatgaccatggaaggacaggtttctgaataagagaaagacttatccaagtaaaattatgttcagacattttacttacaagtctaaaaatcacttgctacaacagctacaatagggtttttgtaaggaagtaccactttgtaaacaacatttttgtagaatgcattatatgcatttttttcaaaattgaaggaaagccccatctcaaacattcaaaagaatcygctcaattatcaatgtagactagaaacagagatagagaggggagatacagtttgagtgttttctgtattatcatgacagcacatggaacaaccacaggcagaaagattacaaactctgcaataaatataaaggtattggttttataaggtggcctgcaggctacggaccagcacagagctctggcaaatgtggaatgccaggagatgtacaaaaaaatcaaggtgacaaaagaagaaaagacactccaaactgccaagggtttataatcatgctgtggatatttctgatcatcagtgtgttaatggttttcactatagttaaaactataccatttttgaatgggtaataggtatgaatatttatgcttaattagtagtttataaaatttatactatttattttcataatgttgattttatgattttcaacgagtgccatttgtccttaagtcatgaagtggatgagcccccatcaagtgattttaagagacagtaccttgactgagcagctggatcaaagcctgtctgatctgggcagagcaaataaggaatacttcttacaaaagaggaagcattcaattctatacactttaccttggtactccttgttctggaggcctcagcttctatcatgttctttgccacagtcatatacccaccttctaccttggctctccctcctcctaacttccattattttttctactttcaaactataattgacaagcctttttaatttcaacaagggtctgaagagaggtgtctgattttccgtaaggctgggttatataagcacacagagttgaatcagagcaaaggaaaaatccattggcaaaggaagaatactatatgctactttaaaacttgtctgaatgtattattttatttacttattttagaggcaggtctcactctgtcatctaggctggagtacagtggcatgatcatcactcattgcagcctcaaactcctaggctcaagggatcctccagccacagcctcctgggtagctaggactacaggtgcaccctaccattcctggcttaaaaaatatatattttagagtctgttttgcccgggtttgtctcaaatacttggcctcaagttatcctcccacctcagcctcctaaagtgctgggattacaggcatgagccatggcacatggctcaaattatataattcattagctggtaatagtgtaaatttggaagagaaaaactaaaatgataaagaggaaagatggattgtgaatagagtaaatatatattactgtaattatgttaagccaatcaaatgcaaaggacagttcaaaggggacaagtatgtaagccacattccaaaaaaaaaaaaaaagctttgaagtgaagctttaaaaagataagctttgtgttgagctaaagaaataaactctataaaaacaaaaccctaaaattgttatgacaatgaattaaacattcaaaaatgaacagaacagaatgtaaaagattattccttcaggtggtaaatgttcacaaccagctctctatgggggaggggaagggcactatttgtagtatttgctgatttctgtgccaaaaaattctctcacctgcccatttcaaacagcagaggtcactaaatgtggagttggcaagagatacatagacatagtactctatacagtgtttctatcatatagatacagtagatataagttgccccaaaaacataataatacaaaatgtagccaaatcattcagaagttatgagttttgaatacttatttccattgtttttaatataatttgtttaattatagttaaaaatttttatgtaatttaatttttaataactgttgggtattaacaactgacttataaatactcctaaaaatgtaacagaatgtagtgagggacaaaatggatgcggtctctgctttcatcaagtttacattctggtagagaaagacagaaaataaacaagttaacaataaataaaataaatagagactgagatgagaggttctgcttggggaagccagggaaacctttacaaagaaattgataatttatttgcatataagttcaagcatatccattccatacatctgtgagtacatttgtagttctaggcctgaaactcagaactgcacaaggtcaatggaaccatataaatattgacctcattactgacttgttttcagtctccagtctcttgagtgaatttacctttgcttctttgttattataaaaatacagtgagggaaagtaaaacaaggaggaagatgaaaagaagatgtagggggaagaggagcagtttacaatatactttctattacattgtttcacactatctcaaaactttttatacgtagaaaatactaaagcaaagaaaaatggaagttaaaaatcggtagcagtagtaatagtcctatagtaggaaccttgttttgtttgaaatatgtgtctgtgtctgcctacaaaacataaacaccttaagctaagaataactgtgagattaattttttattttcaaagaaataatacaaattttaaatcttgcattaaaaggaaagctagctggacgaaacttttctgacacacagattttgagaatagcacccataaatatgcttccaatgcttgtcacttgatccctttttggcaattaacttgcctttaattgatttgtggattacccactggaagttgctatggataaaggaatgtaatggcagagtttgtttatatagggtaacaaaatagactggctgggaggagggatttaactgcaaaatatccttgattttcaggaatttttcttttcacataatggcagtgtttagataaagaatggaaagttaatgaatcagatttgtgttcccatccaaagggaagatttatgtcctgtttaagaatcacattaatttgatgacgttagtacattctctagtgaaagagtggccactttagtggaggaaaaaaacaagcaacaaaactccttctgccatcttcaggttgtacctgacgaaaagcttttatttgtgggttctatgaagtatcactgccctgatctcagatgaactaaaagatgaaaacatttcatcgctcaaataattgtttatctcacatcttactggttctagaaaaggactatatattttccctcctaactttcctcagtttcttggtataaagttcaaaatgctttgagtagagttgttcaggaggtcctcagtggcactgccactcactggttgggacgtttttgttctctgtcctcctgtgtggaagatgacaaggacggctttgtgcaacttctgttgtatgcgctgcttttcaaccccttggatgagatactcatacaaggaacgtcaggtttttttcctaaagcaaatccgtgtaaactgagacaacataaaccttagggagatctgacacaccaaaatgccaagaaagggaaagaagaaattattatcggtgggggaaacaaattatcctgtattttggagtgaatttaaaaggcttattgtttgttttagcactacatgacttaaaaaaaaaagtctcgcagtcttgccttcctcatgttggttaaaatggaaaggattctctttctttgctatttatagataacccttagcactctgcaaggatctatttggtataaaatgatgggtgtgaatgtgccagtaagagagaaaaaaatgcttagccatatttactcatataaccaacatctaggtcaaaatcaaaatattaccagctcccaaggggacccctttattcttctttccagtcactatgcacccgaagataaccactaactgacttccaatagcatagatttgactacttttgaattttatatgaatgaaattatacaatataaactcttattttatttcagtcaatattgtgtttatgggattcattcatagtgttttgtgcattctttattctcattttgttagtattgcaccaaatgaatatgctacaatttacttattctagtgttgatggatagttaagtattccagttttaggccattatgaattagagccattatgaacattattggatatatcacttagtaaacaaatgtacatgtagtgttgcagtgttttgtgcatacacgtaggttgggtatatcccaagaggtaggatttctgggtcataggttatgcctttgtctttagatattgccaaatgtgtttctatactggttgccacatttatgtcgcccccaaagtgatgtttcagttctctgcattcttaccaaagtataggtcatccattttcagtgatggcatcttaaaaaatgtttgcctgtaataacaatgtcatcatgccttttatttatgcagttgagtcttttaatctttaggacctgtttttccaggaatagtgtgggtaacagtgagccattcacactctgtctgtttctcctcatgatgaatactatgtaactgtgaattaagtgactaaaataagaaacgatctgatatgcagaaatagagttttccctgtttgatccatatgcagcttaaatatgtgatgttattctacattttatccagattcatttttcaaaccaatagtaatcattgttagcaaaaaccaataaataatcttttattctgttttaaaatttccatgtcgtactttgagttcttgctatatatcccgtgctcactttaaatcaggttttccttcccgtacattatttcttggaaaatatgttttggacttttcctaaaccaccttaacctgttgaaaaacactagtaaatgcataggcagtgtaagtcacgctaaaataaatgtgtattgctttttcaagattttgtttacccatgcatttaaagaaggtttttttccctttattttctttcttttttgtcattatagtcattatgtctttttaatgttaagattccggtaatatatattcctcatttttatgtcatctccaaagctccccataactgattgatgatatcaatccggcttctggcatataaagtttgttgacctggttcagtttgtaccatgtcaaaatgtgatcattaattattagatgatgtcaggaaaaatttagtatgtgtgataactgtgggtcccatttcttaaagctttcaaaatccaatcttaaggctctctactttgtggcatatgagggaacataagtaaacattagagcaatatcaaacgtattctaagggtttcatgatgtgaaacaatatatcactttattaccagacagatacttcacatcgtgaaatttgaaaaagcatacgaggtggggcacagtggtttaccctataatcctagtgctttgggagggtgaggtgggaggatcgcctgagtccaagagtttgacaccagcctgtgctacagagtgagaccccatttctacaaaaaatttaaaaattagtagggtgtgatggtgcctgcctgtagtctcagctactctgggggctgagggaggattgcttgagcctgggaggtcaaggctgcagtgaatgtgatcacaggagtgtactccagcctgggcaacagagtgagacctcatctctgaaaaaaagaaaaagtatgtaatttttacgtaagagtcactcgattcatatcatgaagcttgtgctaaaaatggaatcattcagtgatcatgggctgcttttcaagcatttttcgctcaccctttaccattatgacagtaaactttggggaaaggggaaggcatgggccaatacatcttttagtatttcttggttatactaagaactactgaggaactgctaaggaacaactacatagataaaaagtatttttattataacccttgtgaaaaacctcttcccccataaaacgtttagtatcttgtatgaaggcataatgtacttttaaatattcaaatccaattccagatttcatttatgtgctatgtactgtgtaatccaccacgcaaaatgtaatttcttgcttttaatataaattttcattattatcataaatgaagtctcagaccacaacattttgttaggttgcattcaaatggtaatcataatatgacctataccagtttttgcatggaagggcagcagccggctgaactagatttccacttttgtcttggctcattaaacaacaatggacaagttaccttaacttcatgggtcctcaaccttctcattcgaaattgagtgtatggactgtatattacaatatccttttaagcttacagaaataacattatggaggtatgagaaaattgtaaatgatccaagatatgtgcctaaatatttcttcatacatcaagcatgcattcatgaaatcaacaccaagcccaggaaatatcaaagaatagctcaatgtccctgtgaacttatatccaattcaataattcatccaacaaatgtatattgagtatataatctgctagacttatgaagccttaaactttatgctgtacattctgatatatgttgttttaaccaggggttggtcagctttcaaaagtgacccttttgctaacattgttcttctggctgaaagctagtaagtataagcaaaaggagagatgtatatgatctcacttctatgtggaatctaaaaaagtcaaactcacagaggcagataatagaagggggttaccagggggtgatgggaacaggagggattggggaaatggtggtcagaggatataaaatttcagttagacaagaggaataagttcaagagatctactgtacaacatggtgactatcattaagaacaatgtattgtaaaccaaatattatatgtggtcacttataagtgtgacctaaataatgagaccacatggatacataggggggaacaacagacacaggagcataccagagaggggagggtgggagaagggagagaatcaggaaaaataactaatggatactaggcttaatacccccatgacacgaatttaccattgtaacaaacctgcacatatatccctgaactttaaataataacaaaaccaaaaaaaaaaaagaaaatttctaagagagtagattttaaatgttctcaccacaaaaaagtatgtgagttaatgcatatgttaattagcttgatttagctcttccgtaatgtgtacgtatttcagaacatcatcttgcgcactataaatgtatgcaatgtttgtcagttaaatatttttaaatgaattttttgaaaagaggaggggtgtgaaaatgaagactacttctgactttatattttatattctggggttacaagaatgagacctccctgatgcctacacacaaatggattaatgtgaaactgaaggtttacttgcccagtttacttgcccatgtttacttgcccagttgattcagctggtttatgtataattgtcaacaatttaaactctgtcccattcctccccaaaatttatgtactttaaaaatagatctcatcatttcaacatttcaatttatatatgagagaaataaaaaggactagtaaaaattatatgaagaagcaactccaaatatggtaatttatggttcaaaggagataggtaattgtcttctctcaagagccactagaccacaaaatatcaacatcaaagatgaatgcaagcgctaggggaaacgatacagatcagaggcaccatgtgttgtgcattctggtatttgtcagagataaggaatgaagctgaattttttcatggatttgtcttgaaggaaaataaaatgagaggttatgctaagtataaaactatctttacaaagttcctttccgttaagaccttcaaagatatgtaaaatcataatttgagaattgcttttaaggacctaattcaggttagctaacaaatcattatctaaaaagagagtgttagaatactatgcatttaaagtgagtagttcacttcatgattgagcagaaattcctgagttcaaatcatggctcttccacttgcagcttrtatgacatttatgaaattccttaagtgtgctctgtttcaggtgcctctgcgcctacatcattagagttattcaagtattaaatgagataatacatatatagccgttaaactagcgcctggcatagagtaaacagtcagctcacatcagctagcgttattcacaagaataggctatacatttctttccatcaaagataagtgcaagtttgaatagaaaaattaatttatgaaacaagactgattttatgcttttctatagtgcccatgattcaaaggaaaagaaggaaataatcaccaaccaagtgaccctgtaaaatagataggagttacgccatgcatacatacatgcatatatatgtattttggatatatatggatatattatgtgtgtgtttgcatacgcattatatatacatacatacctttgccaagaaaattggatgtctcatatctaaaaaactttcagtgttaagaactagccaagtgtcaagtacacaatttgtattcaacatatatttacagaatttaactttgtaaaaatttcaaatcactgttattgcttttcctacttgtaaaacaattacaaaaatcccttggcttttgtggtgtggactattataagggactctgatgcttcatgacagggagtaatttgatccaaagtacaacggagctstcgtgtggatttaagttaccaaactattgaagggacccatgcaccaccaagtattcaaatcacaatataatttcattattctctaccctcccttgcaaatgtaataactctgaactgataaacacattgtacctgtgtagaaaaatgccacccagaaggaagctgactgctaatctaggcctgtgctgtccaacaagagagctagtagccatagagcacttgagctgtggctaatccaaatcagatgtgctggtaatgtaacatgcacaaaggatttcaaataatagtgtgaaaaaaagtaaaaattttctcatttgtaattttcataatgattacatgtttaaatactaatactgtgtatagggttaaataaaacatatttaaattaatttcacctggttgtatctaagtgtccatcagccaattaacggataaagaaaatatggtacatacacacaatggagtactattcagccacaaaaaggaatgagatcctgtcatctgcaacaatatggatggaactggaggtcattatattaagtgaaataagccacacacagaaagacaaactttgtatgttctcatttgtgggaggtaaaaatgaagacaattgawctcatggagatagagtggaaagatggttatcagaacctaggaagggtagtgagtggcaggggtgtgggagtggagatggttaatgggtacaaaaatatatttagatagaatgattaagatctagtatttgatagcacaaaagactgattgcagtcacaataatttattgtacattttttaattaaagagtataattggattgtttgtaacacaaaggataaattattgaggtgatggatacctcatttaccctgatgtgattattaggcattgtatgccttatatcaaaatatctcatgtaccccataaatatacctactatgtacccacaaaagtaaaaagtaaatacattaatttcacctggttgtaaaaataactttttgtaatatggctttttaaaaatttaaaattacatgttgtggccatcattcatggttcacattatrtttctactgaacagcgttgatctagacagtagacactacgcaaaaacagctaagaaaattattaattctttaaaaggataaaatttaaagtgataaatgagatcaaattttatgagcaagtccatcgtagttcactctgtgcttgtttctagggaaaaaaaattggaactttctgtagagtgtgccagtcaatgcaaaagtgctcatcaagagagaattaaaacattagcaaataggggctgttgatgaaaatgagattccagagagggtgagaagactgaacacattcctgtaaagcaacagggattaatgcaccaatgagaattgcttttttttttttaaacaaaacaaaacaaaacaacaaaaaaacccactaaatttttctaggggaaaagtaaatgctagagtgatattagtgaattaggggatttgtgaagatgcatttgaatgtcaagaatataatgtagttttcttagtatttttgaattcagtgaccttttgttaacctcaagagactgaggctaagacaccaacatttaccatgtgcttcaatcattctctcaaggacgcacagctcctctgagctgtaataggaattcaggtctgtgtgactcctgagcccacatgaccgaacgtgtgcccatggaacactggtccctgcaactgctctgcaaataatggttctatacttaaatcattttaagaaatgttgcatgtatcgttaccgtcttaaacatgattcattgatttgcatattaaaggcactgagaattgctaaaaaactgtttaactttttaaaatctttttctcaaacttcttttgccacagaacacctcctcccctgcacatgcatctatatgccatttatcaccagttgcatgctgaaactaaccttagacagaatgctatttggaaatgctgagatgccttaaattgccttctatcatctctcattattagttactaaggaaaatggctttgagaaaatataaaatatttcaggaaaatatgtaatttgatgctcagataactcactttttgctacatcagaaaaagcaaaactagaatttaaaaataaacttggatgcatgtcttggttattcttatattcatagtgtgtgatccaaagggagtcaaagaaatctgtagcgaggctgctcacagtctaggtctctttttgtgtaggacaaaggtagggcttggcttctagttgaagctacagttctgtaggacttgggatttggaaaagtaatgacaagataaataagttatcaccatcagagacctaaatggttgcaaatttggcactggttacataatgaacaaaagtttcataacatatttcataagatattttcataacatatgtcttacaattactttttttattttctgaggttttttctctaaattatgctaaaaatgtcatcgagaagcataaaaacagactttcattaatagttgctatagcagtgggaaatttttgtaggaatttaagtaaaaaagcaagttatttagcagttttgttcaaattagacatttctgccatcagcctgccccctgggaacttggaaagtgcatacttgctcttgagttctgctagtgccctaaccacacgcctttcatgtctaccatacttcgatgatcttggattcaaatatgatcctctgccttcctcacagaaagaaacaatttagggacatggacttaatggtaatgactttcaaaagctaatgacgtgcagtctttcggcactgcctagccgaacactctttagacaacctgctgctttagactggacatgcacatgattcctaagatacactaaacaagaatatgagatgctgagtccattgtttcctgtgcaaaattcagttcaccaagaatactattttcaccaagaaagccatagactgtgtgtaggtaaagaacttttgcgctaatgaaacttgttattggctgggactaggggcctaaatactagtttgagattctgtttctgctgtgccatatagcatgagatmccacttttgcctctataaagcagggctatggttatctttccttattacctcagttgattgttggctgtgagaaccaagtaagatatgcttcatggaataacagaagaatgcaagatattatcacgggaggcaacatttttgggatatcacatattagtggaaacttaaagaatatttgagaggttatctttgacatttacataaaaccatgtatgaaacaagtagttcttgtgtttttttaacctatgaactttttcaagtgttttctccacaacattcctctcttctaccaaagaaaatcagtttacagtcatgtgttttgtaaaagcctaaatgggaatgaaggtggttagtaagagggttcacaagatggagaggctcccatgacatttgtaggtttaatctcgtgccccatgacctcttaaaatgtccccatgcccattcagaataccccaattcacttcaaaggcaaaaacaacgtgacattgtgaaatcataccrgatgttctagtagaactgtgttctggtcctattgagttcacccaggagaggcatcaaactctgcaatcagaacatatcaacacatggcctattagctgattctgccacttggtagctgtatattctctctctgtttagtgtccttatctgtaaattgaaataataataatagctcataaggctttgtggggattaagtgagataatcatgtacagtgcccagcacagtgtctactgcatggtaaatactgcaaaaatgttagctgttgactgctcctatttatgaccttcattattaaaaaggggaacttaggctgacgcaggagaatggcgtgaaccccgggggacggagcctgcagtgagccgagatcacaccactgccctccagcctgggcgacagcgagactccgtgtcaaaaaaaaaaaaaaggtgggggggggggaacttatgaatgcctttcacttataccagcatcattaaaaatttaagttttttaagaaccatgaaaagctaaccattgacaatttaagaagcatgcaagcttggtttacaaaagaactggacaagctcagaatgggctagttcagtggagtgactgctgcaggagctcaggttttgagaccttcctgtcttcttccttcatccttctcctctttttgtgttctctccacacacttttcctcatcaaagccaaaacctttgttcttgctatattctctttttagagcctgctcacagtaaaattttaaaaaaatgaagaagtgctgaaagtgtagataagcaattagacatgagttaatgttttttatttgcaagagcatttgcattctaatatgaactgaacattgagtaaatagattcctgactccctaacagggctatgtcttgtgtcaggaagccagcgcactgggcttcttggtaggcaggagacccaagtcatcatctgctactaaggctgggtcttggaagatggagaaggccgtagaagaaaggaaagccaaaaaaagaaaggaatgagattttgatatattaattagctcatacyataagcctggacttttgctaggcattttccatggtaatttggttatacctcaaaacaattctcaacattattatcactgccaccacttctgttagcagctgtgagaacagaggtcatgtgagtaagcagtttgctaagggttgcatagcttaaaaagtagtcaataagctaaagtttgaaccctgagatgcctggccttcacagctaaacttttattaattacacctgcttctaacaacaacaaccatggctaaagtttcattaacctaccagtttctaacaacattaacaaaaacattttcaaaaatataataatagtcatcaataggaataaagggaaacaatccaaaaatagctctgttgaggttactgatggatggggacaggaaagtacaaaattttttctacgaaagtttccctttgaggatcactttccttggctgtcttgccttgtgaaattataccttccctaatggcttggagctgattgtgcccttctttctgtcaaggacagcttaaacttcatggaatagtttatttgaagcttgtgggtaccaattccaggcagcaagatactactttcagagattcaattaacttccttcagagtcacagcaaaaagcgatagagctaaattgattaccttgaagtgccttaaccgttttgctgctgttgttacttcttgagccaatttattctcccagcaatgtcactgttactgaagttggtctgttctttattctcagtttatgaataggaatcatctgaatatagttatagacctctagtctagatcattttttgcaaaattacaaagatgggaaaatttccaagccatagttattccaaatggctgggagtgccttaggaacttatttctggagtcttttgaactatttatattattgatatgaacaatgcccctgattgttagttagcaatctattcattgatagggacatgaaaggcagtctgctgccatctagctttttagtttctatctttaggaattttccggtcctttcacagaaagacactttttaaaggagcaattcttacttcatccctgagagggagacacttatgaaggtactgcagaatcttaaaaaaaaagtcttcatcattcttttacttctttttgcctttaagttggtcttaaatgggtaaaagtgataaatgtaggttgtgtagttcaaatccattgcagtgactaagcagtgaccacccataggggcaaaaactatgtatttttagaggcaaagattgataaccacagccatgaccctgagcaagactgtgaaatagatgcagttctttgccatcctcccttttcctgagttatgggcactttctgccttcatagctgtttcctctgcaaaatggagattttactgtcagaagtctcctattgctattgcttcttggagttggttcccatgctctgggcacaggaaagcaatctgagatcttcactactagtatttattgagcacctatactatgccaggactggactgtgctctgaggtcacagtggtaaacataccgacatggttcctgctgtcatgagccttccaaaggaatagcgaagaaaaacattaaacatatcagcccatgattaaatgcataattagataaaatgcattgaagaagtaaagatcccaggaaaggagagaaccaattaatatgatggatgggaaatcaaggctgctggaaggaagtagtgtataagctgaaaaatgaggagtgaataggaattagccaagtgaaaagcagaggcaaatgggtttcaggaaaaggaaaaacatatgtaccagtaacatttcaagaagaaatgggaaggattagatgatttctgttattcttattaggttgatctcttccatggaagagacacacagaatgtaattaatttatagaatataaaaatgatttttttttttaggaatggggaggtgaggagaagacccgcttcaagttctgttccaatattaatatggttttgctttctctacaaacctaagtaaaacaatggtggtaccaagggttggttgggaggcactagttttcccagtgtacatactcacaactaacataaaagctaaatacgtataatcaacatgcttacactacaaacacaacttcaaataaaattcactagatcaaccgggcacagtgcctcacacctgtaatcctagcactttgggaggctgaggcgggcagatcacctgaggtcaggagtttgagaccagcctgaccaaggtggtgaaaccccatctctataaaaatacaaaaattagccaggcataatggcaggttcctgtagtcccagctactagggaggctgaggcaggaaaattgcttgaactcaggaggcagaggttgcagtgagccaagatcatgccattgcactccagcctgggtgacagagctaggctccatctccaaaaaaaaaaaaaaaaaaaaaaaaaaaactccactggatcctctcttccaacttttttcccctaatttcttcccttagcactgatattatcaaacaagtggccaatcctataaaggctatcagactccaatttaaaaaaactattaaatttaaaaacactcagagatataatgattgtatgccttttatgaggaaacttagtacctaaaagaaaaccctataacttaacattaagcatatgaaggtagctattattcaaataagtagcagtaaagacttttcagctttggatcctcataaacaagacctgcaggtttaaagatttgcatacatcttttaacaatgcatcatttttattatagtatattatatactattttatatttacttaatgagattactgacctgggtttcaagatatgtatgaaatataattaggatatgaaaattaaagataaattatccccaccagaaataatcttagcaggttatttactaaagaatcttaaatccagcagatcaagaaaaactccccaaggagtctttaattagaactctttaggatggaatcaaaatctctccataaaaaatgaatcttgccttaggctacataaattacaaaatctgaagccctttaagcagcattaaaactgctgattttaattgctctgataatgaactggagagagacacactaagcttcctggatttctgttggaaatgaatgggattcttgccaactatggatcacagttatgaggtattctgcacagggaaaatcaaaagaaagcagatggaccttgacatgctatgccatcctatgccttcttccttcccaagaagcatgttacaataactttaagtgaaggttgtcacaactttaagtgaaaagtctcccctttctgtctaatttttaatgtaacttcccccttctcgatatatccagaaaatagttaataacaatccctgagggaaaagaaaaatgctgcccttcatattaaaaaaaagaagataacagagatccccttagtggtgagtgatttatagtgaaaacagccaactcattctcttttgcctccttttgacctagagaactggattcgcggatttgtaactggattttgattatagagtatgttctatggctacaaaagagttttcctttgaggaaaactcaaactgccaacagatatgcttggtatatcagttttcaatgctttcaattgtaaataacagaaacctggactcacaatagcttgaacaaataggaattacttttaagtaggtggcaccggaggtgtttcagctgttgcatgatgttatcaccatttgcaaagaggcagcatctccacaattttcttggcctgttcctcttgatggcaaatggctactgcacgtccagatgatcatgtctgtgtcacagatagtgagagggaaggaggaaggatgagagaggatggccagctaaagttgtatctaccccacttataagaaacacaaagcccttccccagagcttacagccctttagccagaactatgacacatggtcatcttgagtgcagaaagatggaagttaacatttggttttctggtctttttaataaagatagcaaggatgaagaagtttggaaaagactgtgggctagccaatcaaattgtcgaccacatttggcctgtattaatgtatagtttttaaagcctaatgtcaatttgttaaggtgtcttaaggacaggaaaatggagaagaactaagattttttatatcaaatacagagtaaatcttggaaagggtgaattagagtggaaaataaactagacattatctaagagtgccttgaagccagatcttgcaaaacattaggcaagcatgtcactcataatggaccccagggctttccatctcataatgtggataaaaataacagtgtttctctcagtttttaaaaatgtcaccaaaaattcaataaagtatatacatacatattgtaattgtttaaagtaaaaattttatgctgttttgggaagaaaaataaccaaaaaaaaccatcactgaccattggtcatcaaaatctgatttatgccatgtttacaagataaaaacaagaataaataataattgtttgaaatattttcatcatattgcctctgaaatgattgatgtcatactgcctggatttagtcaactcagtgaatgatttatcagtagccatgctctaaggagctctctattcatagatacttatgatttggtgaactgggaaacccacagagaaaggtaaatgaaataggagagccaggtaaatgggccatggatctaagaaccaggaatcatgattgtttggaagaacatatctcagactgagaaaagctggcgctaaagtaagctagcatttgattagaatgttgaaggataatttcattcttggagacagaaaacctaagtagaagcaaaagaagtaggaaatagaagcctgtgtttgagagattcagagtgactgtgttttattagaattgcaagaaagggaacttgaaaacataaatttaacatggggcaacaggccttggattctgaacagagggactttgtttaaggatggctctgtggctgtggaacagtttttctatagattatcaaaatgattctggaaaagaaatgtcattctggactgagagcacataccatagggaaaacatgaggcttatgggctgaattgtgtcacacccaaagtcatatgctgaagtcctaacctaggacctcagaatgtggctttatttgaagattgagcctgtaaataggtgattttgataaaatgagatcattagggtagacccgaatccaacaaggctggtgtctttataagaaaaggagattaagatgcacgcgcacacgcagagaagactacgtggagatgaggagaagatggccatctacaagccaagaggagaggtctcccgaagaaaccaaccccactgacatcttgacctcagtcctctggcctccggaactgttttaaaacataagtttctattgttaaagccacctaagtctgtggtattttgtaatggcagccctagggaaaaactacaatgagcaagtattatttgtattttaagaaataatattataaactaaattcatggaggggaaaatagaaaaagaggtcatttctgaaaacattgtataggtgtaacatagttgacactatcaactactacaatgggatcaggagacagagggtcagtgataacggagctctcaagactggaaactgggcgatccagaaggacaggcggttgatgaaagaaaatgatgagtgtggttgaggctgcgtttcccttgaggaggtgctggtgctcagggtagaggcatccatcacgatgtcagaaatgtgtgtcagacacgaaggcaggaatgaggctgtcgaggaagccatggcaacataaacagagaagtgccacagcgagacaaccagccaatgagttgtgtagtttcttgtaagtagctgaaacaacataaccaaattgttcaatttagtctacatatgaaatttcaatgtcagagaaaggcctttaatctcaaaacgaaataaactaaaagacattattttcctgacagctaagtcttaaaatttcttttgagaaataaaaaaaatggttttctcttttaacatagaggcaaaccagtaagtcagatacttcaggggaaggtagcttggtgatttgaatgtatgtgagtgtgaatacgtgagattagaatcttacctgagaacaaattttcatgagcatcattggagagtgggagagcatgaagacttttacccttctctctgcaggagagaattgtgcaggaggaggtggggagaatgccaccaagaacaggttgcctggggctagtttagcgatggggtccaaacgatctcactaatgtgaaaggatcatagttaccttaccaagggaaagttggcttcaactatatatttcacttctgtaccaggttttgcttaaatgctactctttggagaatatcaagaaatttagatgagtttaccaaatccaagattgtgttccctgcttttaactcttgttactgaaatagccccctgatccccaagagtaatgcttgactgaggtgtttgcatgaattgtttatatcattcattaattaacgtgatgaacatattaaagataggactcccagttttcatcccaagggcttacatataatagtaacaacctttagaaaagtactgcattgtttatttatagaatggctttgactcacttaataatgctccataattaatttgtaaattactttttgactttgcacaattataatttaatgtcatatatctgcaaaagaaaacacttttatgttgctaatattaatttcccttcataaatttgagactgttttgactatagataaatgtaaaatgtcaatgtggtgagaatgactcagcttctcagatattcatttattctataaatatttttgaatacctactatgtttcaggcactgatctaagtgttgaataagtagacaaggacagcctgccttcaggttttttacattcaaataacacaagatgatgaagaaatttttaaaataatctggttccatttggcagataatatagatatgctcagttttataaattttgatacctaaagtattgtgataatccaaatcatgacctttagacattacactatgcttattgattgaaggttgacatatgtttagcatattctcttataatgtatttaaggacttcagtgagtagacaaaagaagtaaacttgatcagacaacatgatttctgagaacagactcttcctggagcaagcattctggttagattttacagggcttcaataaaaaggtatatgtttatgctttttgctagttgggggtttcctagcaaatgattccatgaaaacatttgcagggaattcccatctgttctatatttccctgatttgggggctctgaatcaataatgctgatgtaacagttggcaaattagataagaacagcccgagacttccttttccattaggtgtagtctcatggaaaatcacccttgaatccatcaatggaatgaagcaactgggtggagcctatgggaaaatcctggaggaagtccccaactagtcagcctcccctctctgccttgcactcttggattccttagcgaaacatccaaaatggccttcttgcaaggaggatgcagtcggtgatccacatactgaccaacagctgtgtgtgaaaggcaccgtgcccaccacaacaaaggggcagtgaggtctgctgagcagatgagtcgcttttctggacccttccaggcttgcagttggctcagatgaaaagctcaggcttatgagctgccagaaagtatttggcaaaaagcccaccttttttctcaagtacacgtattcaattgacttgattcctcagagagatttgtgagggtgaaagcaagttcattgtccacttttaatgaccctcaacttctaatgaggtaatatatgtgaaagtgatttttttaaatgcaatgcaaatacagggtgtttttagtcattatttcagtacctgaggaaaatgtaaaaacacaaagccacacatgtaccaaggcactacatgagtgtacttggtttcaccatctaatttagccctctgaagtgtagagtccatcgaggctattattttgtggattgtgtactgaagttgcttttctttgttctcccaacatacacttgtgacacttccaacctctgatatgtatatgttaaatacaggctgtttttcaaacaagataaatcaaatgctagctaggaagtgtgcctagagtttaaagcattctagaatgtactcccatataacagctatacttatataatacctacattgtgccagtgtttcatatatgtgaagtgctttaatcctcacaacaaacataggagggatgtagtattattaccccctttttacagatgtgaaaactgcagtacacaaggtgaagtgagaggccccaaatcacacagctagtaaatggcagtgtcagacctcaaattccactagtctgtcttcagagtctatataattaaccactgctccctgtgcttttaaaggttagtttaatggatattgtgctatttctaataaaaggatataatttttgttatatatttttcttcttagtcttcacttttggatcttggaccacatgtgctattatcatattttagctcataagagacttctctgataattttgtataaaatacacttatagaacatttgtatcttgtaaatgtaatttttcttaccattatctcatttgatcccccttatccacctctagaatatacagagctttatcctcatttttcagacgaagaaatggaccaaagaagactaaacaatttgttcaactccatatcaccagtttgtagcagttctgtgactagaaaccaaatttcctggctcttagtcctacattctttctagtatttcaaatcatcttttcatttctctcccttatgcttttggaaagaaaattgagaagaacgttaagaaccccagtaaaattggagaggcatttcttgagaaatatttaaaataatttaagaagtcttcacaaaagtagtaggcaaaaatgtgttacattaacaacggatctcattaagtcagtgcatacagctaggttctggtttattaattttcaattttttcatttttgggcctgcctaatctgaacactttgcagtacaattctgagtgctctcatgctttgtgctatcgctttcttaaggtagctcatttgcacttgttcatcatcctgttccttcccccagtctcctgggctctgttgctaattattgacccaggaaagcctcagaaggggccaaggcagctaaaattggagtgctctttacttagacttataatgcattttccatttttcagaaagagtaaagcacttttagctaccagatccagagaccattcagttatatgggcacttgagtttctgctaaagaatcacaactcaatttaattttttttttttttggtatttcattcacagccagtctggagtgtgtgtgtgtgtgtgtgtgtgtgtgtgtgtgtgtgtatttctgtttctgtattaacatatgagacagcagaataataatgtgtccattcattccatagatatttctcaaagagttgccaagaataaagaatagtgctaaaaaaaggtggaagatggttaggtgtaaaattacctcctctcacaggacctggcacatgacaaatgcttcagaaatatttatcaaactgaaatgagctattacatgaattgtattctctggctttggaatctattggggaaatgatgaagtcattaaatatatgcgaattggaaaggaatttaggaatcatcttatgcagcccttttactttaaagatgaagcaatggaaatgcaagaaagttatgtgtcttttccaagcaagatcacacatctatttcgaaataatatgctttttttcattgtaacatgtgttttagagattacacatatgtcaatgtctgtagtgcagggcataatgtgaggagagctgttgaatgctttagaacagtgctacccagtggaaatataatgcacaccccatatacaattttagatttttattaatagccagatttttaaaagtttaaaagtcagtgaaattatttttttcatactaagtcttcaaaatccagagtgtgtattatatttttgacacatctcaatttggactagccatattttaagtatttaatagttatatgtgtcttggggggggctactctatagactatatggctccagaatcacagagagggaaaaataataatgtatttttaaagctgcagtatttttaccatgggttatatttttaagtttgattgtaacacaaaagtacaaaaatgaaacaaactgactcaacacattttttttcttttttttattattatactttaagttttagggtacatgtgcacaacgtgcaggtttgttacatatgtatacatgtgccatattggtgtgctgcacccattaactcgtcatctagcattaggtatatctcctaatgctatcccttccccctcctcccaccccacaacagtccccggtgtgtgatgttccccttcctgtgtccatgtgttctcattgttcaattcccacctatgagtgagaacatgcggtgtttggttttctgtccttgcgatagtttgctgagaatgatagtttccagcttcatccatgtccctacaaaggacatgaactcatcattttttatggctgcatagcattccatggtgtatatgtgccacattttcttaatctagtttatcattgtgactcaacacatttaaaaaaaaaatctagagtagacctatacaatttgacagattgcatcaatagttacaattttagacacccctacccctccacacatagaaattagtgaataagcagactgtcaatagtactggctcaaataattctacatacaagttctaccaaactttcaagggaggggtaacttctaccttatacgaattatctcattttacaagtaactataagtatacaataagttccatttgcagcactataggagcttgaactgtctgccaatttttaaagaatatgctcaagcaataatcttggttatccatattatcttacatttccttatgaatattgagagttctgttattgataaatacaaaggtgtcactgtttaatacactactgtgtaggtccttttgctatgcatttactatttaaagcgtaaaaacgtaggtagcaagaagatttatctttctggctattcttgaaattcctgtttctaacaagatattctgcagaagcaaagatactactgcattgttcaatgtttccacaaaaggttaatataattgtgggttcagctatcaccttgaccttttcttggatctttgatcagagtttaggtaaatatgttgttaggtttcccccttttaagttcctgagcttttgaagtaaaaccagagctgagataggaaagtgaacagcaaggggcagagcacagcagaaactgaattaggtcacttttctagaggcttctgaatttggtacagtaggatttctgtgatcatcttaaacctagcttttcaaaaggctattactgttccattttattctctggcccagaaaataaatcagaagacttctacatccttttcctcaaaagctgattctgattctctatatgatgccacattaataaagttttccctattaattaccatgatgccatgcagccttctaagatgttttctttagttcttagttcctttgcagttccatctccaagcataaattctcattaataatcagtacagtgaggaagatagacatgtgtcagtcagtgagaatgcttgcagctgtaactgccagaaagttgtaacttaactggcttaaaccaaagccatcctgaggtgggaggctccaagtcactcagtgacattatcaaaggcggcctgagtctttttcatctttctcttctgccagcctcaagtgttggtgagttttctggtttgttcctgtaaactcgagatgtctgtcacaggtccacctattacatgcagataactatggccagtcagaaaagaggatcttctttttacgtcttcttttaagaaagaaaaaaaatcatttccagatggtctccccttgtcccacttcccttcaatgtcttattggccaaaatggtttcacatgccgatgtcttaacaaatcactgccttggaaatcgtactttcatgattagctgagacaatcaggtttccctcatggtggctggggctgaggcccacctccctgtaagtatgtggctgcaagggtaggtggatatttgaatttcactgggggcctagtaggaaggaatggctcttgggtaggctacccatagagtcaactacaagtaaatcagaaactatagtatcataagtgctacagggaaacatgtaaatgcaggatgctgtaggaacacgcaagaagggcccctggccatgcttgcttgagcaagagggagagaggaatgccagagtgggcttttaatgaaaatgttatctgatctgagatataaagctcaagaggagatagccaaggaaagggtggtggaaggagagagagggtatcaggtagacacagtatcatgtgcaaatgactgggaataagataaaatgtggtaggtttggggagatgcagaaaaattagttggcctaaggtatagagcataagttggggagtcagtcagaaatagggctatagaggtaaactgtagatcataaaagatctgataagtcacatagaaatttctactttattctgctgcagtggggagccagtgaaatattttaagcagcaaatgacataattaaatatgcacttcaaaaaaaaaatgtctttggctgctgtgggaaattggattgcaaatcttcaagaccaaaagtaggtagaacatgtgagaatcaattacaatattccaggaaagagtggtgaagggctttaagataatgtcagtggggctggagagaggtgaataggtttgattgatgtttaggggttttgactaaacaggacttggttaataggtaagagaaatagggattaataatcactcacatttctggcttggacaactaggaggatgggaatgacatttactgagttaggatatccaaagaagaagcagactgggggcaaggggagtgaattaatttaaattgtaactaatgaagggcttattctgtatgaaattcaagagaagtattccagtccttaaagcattttcaaatgccaagggatatattaaccaataagtggtatagaacaatactaggggtactataatttatcacagatggtcatcaataaagcaagagagagagataaaagagcttaaagaagaaattgcctctctctcagaaagaattagtgggagaatctgatgttcttcatgaaagaaaaaaattttagttgaatcttgcataaaaagattagacagatgggaattgtcgagggtggaggcactgtacactacatgaagcatatttaaggaatgataacagtctagattgctagcaagcttgaataggcaaaataaaatagaaaggttagggaytagttgaattagtcagaactgttgagattccaagagaaaaacaaaattcacattttctgtgttgatctattattgcaaggtgcattagtcagctattgctacagtaatgctaccgaacaatcaactacaaaataccaatgacatttgcttcttgctcatagtcctactaatgggtcagaatagtgctgcttcaggctgcaggttgccttcatgcttgttcttcatgtttctccttcttggaccagtgatctcccagggcgtgtccttgtggcacagtttacaactcccaatgtggcaagtagaaatgttcaatactttgtaaggcctcagtttataaagcagtatcatttgtgcccacattctgttagccacagcacataatrtgactaaacccaatatcactgagggaggagagcatgaggaagaaaaggatggtgaatatatgctgcaatgcctaaaacataatgtaaatatagatagcattggatttgacccataagccataaagattctagaataccagtgttcccaactatggagtgcccaatgagcttcttgacaaactcaggagagtaacctccatttgtgtgacctcctttctttgctctttatttgtgcttttcaaagggatgacatgagcccataaactactcattgggttgcttggtcagaatcagaaccagttacttcaggactgtctcatttcatgattagttgcctttggtctcatgcagtggtatcagttcattcctctagaggtttatgttccctcaatcaccagcaatactgagtgaatgataagaactaaagcaataaaaaatgattgaactattttccttagtatgtagttattggacttcttccaaaaatccagcacacttataaaaaccaaactaaggcattttgctggttattgtgccaatagtgtgtcttaattagtcctgagaatttatgtggcccatgaaagaggcataattttcctaagattgcacagctaagttacatatctgagacttgaagacatcctcagattatgttatccctaaatctctaattgctwtgtagcaaaagattttagccatttttttattcctgaatcaaggatacataaataaagttgtattcaatcaatccaaaaatcctcaagcccaaataatcctagtacttgagcagaccttatagtgtgtgtgcacaagtgcgcatgcgtgtactctatttttagattatcttttaagagggaccggtgacatggtcatacagtacaacagaagaactcactccctgtttctctataattcccatattacactcagcacttgctctcctttcattctgtggcttctgtgctgctagcagtgaccagtgactcaggaaggctgcatatagtgaagaaaaagttgcctttccaggcacagttcagtcctgaggcgccttttcacaccatctcatagacatttcagagccaaactctagctttctttttatgactacttttccattccacacttttcttaatgttgcaggagataatttgaaagaaaggaaaaaagaacagggagaacacaaaggcaagaagatgagcaagatgccagatttaagaagtatatttatatttagttctttacaaattaaattctgctgagacccttaaatattagctgtcacaggggttgtgcttgaaaaacttgattccaaccctaagcataaaaatcttgtctaggcagggcagtagattggaggattatcattacacattataggaggaaggccctgttcaatgccaggttccaagaatgccatctcagggagcgagggaaagacataggccaggtaacatgtctgatgtatggagaaaagccctcagggtgccatgttggtggaacaggagcagaaaggaaatcagactgagagaatgaaaactcaatagaagcacaataaacagactgaacaaagtacagatggagtcagttcaagtttaatatgaatgtccctgggccctgtgtttcatcccagtgttaagtgcaggaaatcattggatttctccaaggatgggtctttagagcaaccgactttagaaattgaatactttaaaattattttctataaacaaatttatcaatagaaaaaatagattacttaattggtttatcttaatgagaaaacaacaaaaagcttcaacaaataattgttgctgattggttggtgggttcgttggtgaataatgagaaggaaagaaggaagaaaagaaaagaaggagtagaggaggaaaggaggtgagagagggagatttgaaagggaaatagcggtgctctaagttcacaatttttaaaagcctagagttattaacaaattatgccctcaatcagattttatataacttttttcaatcttgtcatatattaatgtgctgtattcatgaaatgattttgagattttaaagcaatgattgacaatatagtagttcatttaaagtttttacaagttgctgctgacaaaatatgggtaatgaattacatcaaataagtataaatataagtacacgctttgaagttaaaactcagtaagttgttatgattaaaattgttcactttattttcctcctgtgtatgggtttctcataaatggtaacttatacctatgaaaatacagggttctataaagtctgaaaacatagttattatatatcttaacggaccgaagatgtccttcctgatattatgtatagcctgtgtttccagactaagtgccaggcactattctaagttaggcacgattctaagtgttttactgttcatttaggctgtctggctagtgtttttctcaccttatcagcatcccatttttattaagtgaatttgcctaaacacacctgcacacgcacatgcatgcgcgtgcacacacacacactttttgcatttggaagcctggctattatggaactctagaacatgagagctcagggtcaaccaccaagactcaataaggtatggctggggatgtgaccaagactatcctagcatctatggctgtggactgggtgtcttctccactgacccttgaaggtagttttgcttcactgctttagaaatggtgcagagacttaatcttatttcacttttcggtgtttgtcttggttcctgtagaactggcttgaggcttagaagatgtcctcccacctgcatttggaaaaatacatttctaacacttctcctcatatggaaatttttaagtcattgaaaaactcatactgcagcatttgtagaaacaatttcagaacagagtaccttattgcttttcctaaaagaattttaactgtgcatgtataagtattataaatgcataaaatatatagttaatccaaaagacataactatatcatgcatagtagttataggtcacctcagatatattagtaacatctttttatagagactctgttgttatttcactcacacaaaagaataaacacagaattaaggttgaaatttacataagaccagtctaaagccagccatagctatgtaatttccatgattttctcccaatcaatggaaaattactgtcagctgagccaaagtctgcagactgtgagcaaatgtctgtttccttcccacaactgagtgtttgaaacttttttcaatcagtaaaattaccattaaaggtcagagattagtttttcatgcatgatggattccatttgctttaaaagtattataccaggagagtagactttttttctgactttagaatcaaattagaattcaaatattcagagttttgggtcaacctcaaactattttattttgtttattttcccttgacaaaatgttattgttttaaatagggaaggagaaaggtcttgggaaaacacacacacacacacacacacacacacacacacatatatatgtactctctcatatttgaaattagcatgtagtttaaggatactgcacacagctctatgatgagcttaacttgaatctccttagattatgagcattttgaaagcagggacttgattttttaactaaatacctttcatgtttgataacctgttccttttcctgtgtgtattgtcttaactaaagactgcctgcaatgaacagaagggctatggtcttttttttattaagataaaagaattttccaaatcgttgtttataaaataaaagattagaaaaattcacctgtgtataaattgaactagacttctataacatagcagccatcttgtgcagaaaggggctgcttacgtagtttatttctttaacacacagttgctaattacaaaaacagcatgcatccagagattgtgaaaaaagaagttaaaaaaaatcttgcctattattctaccaccgtaacacaattatgtttaacatttttcatatttttaatttattttctctttccataaattctaatctgtctataaatgtactattgtggtctgcttcgttgactaacagaatattttcacccctttcagaaccctttttttaaaaaatggcttcttttgtgtatttgaaacaatttcaacttaaccctattgcatatattctgtaagtagctgtccttcatgaaacagacaactttttcttttaaaaatcaaggagattgtacagaactttgtgattttaattactgcatggcaaactaattcagtctcatatcctttccatttaatagggatttgtccctagctatgtgacctaagcaagctctttaactgtactccacctcaatttgcttatctgtaaaacatggataatattatttttagtctaaaacttcctctggtatgacagaaaagaccaatgtgaaacaattccctgaatttgtcaataaaccatgttacatttataaaaatgcctccagtgtacccagaccagaggaatctgtggcttatactaaaacgtgtattatgtattcattctcaaggtatatgccaacagttaagttagaaatccatccctttctctgtcacttgtccaaagtcaattactccatgcttcttttacataaggaaaactatcttaaaaggaggaagtaagatcacggacaaacaaaagttcataaggtctttcattttactgcctttcaaaaggttaagatcagagaacttagacatgcataagctttggtttgaggaacaattgagtcaaccatcgtaacagagggcctgaaagtatctgaaggtagaatgaatagtttatagtaagccagtccactctcagctctgagaacatccagctgcataacctcaagggaactgcgtggaaaaaattaagggaaattctttgggctttagagcttttcatttcctatgaacaaggcatctcctgcccttgtctcacccatatctccattgtcctcatgtagtcttctgctggttcactgtgtgcctggcaagtcaggttcttacgcgagggaaagagctgttttaagttgtttatgaatagagaaagcagattcagtcagacgtaatctgactctgtatgcctgcaggggttgtggcctttgttagtttattatgcctgtaatttgggaagtcatgctgcagagatgtaaagtgggatgggcctgaaataggtcttgtaataaaaaggcagttagggaagcctgctggtgtcctgcctggttactactatctaagtgcagcaatgtgttagttgattttaataaagagttgaaatcattgttaactggcctccctcccactgagtgaagaaggcagattacacaggcacacgtttrcctcccctagtgtgtactatgaatgcagctgcttctgaagggccagcacgtggccttcttaaaactttccttggctggggttttcccttcttgccaactggtgcccaccaagccagtggatgctctcaacgtctaggcaaatgccaaaaatgtcatctttggctcagatgtgcactggcctgttagagacaactgccatgcagagaaggaatgtcatcagctgctaggtctcaaattatcagcctggattgacagctgcaggatgtagtgcctgcctatagtactgaggccatgacccacctctggagagaccacagcctcatccctagagtagaactggaaattctccattgagacaggaaggcagcacttgaacctggcaggttttggagtgaagtgtctaaggacagaatttctcatttctccacctctgcccatgtgtaaggcagcaatattttcatagaggtgaagaaggcaggtgtcccgtggttattatgacatctgtttacctcattctagtcactgtgccatgtttcacagccattgtcaactacatttggtgaaaactgtttcctccgtccacaactggaacattgacactaaccacattctagagttcattacatagagctgtgtctgtgggtaagttaacaggtagttttaaataactagatatagtcttttcctcttccatgtaagccaagataatatttccacttctccttctgaacatgtgagtacagtttatatataaatcaacagcaagatggaaatttactctgagctttgtgatgttttcactttaagatgctgtagttctgatcctttatacatttatttcattttccccatctcaaccccagtatatagcaacactcacctgctctagaacatgattatcaactgtttcagctatcaatgtaacattaaaaaaaaagttctatgttcaaagactaaaggaacccaggtagtttcttttaaacagaaagactagttttcatgatcataaacatgtaaagaaatatgtcatttttgaaatttcatgaatcttatgtctataccgattccaattccaaactcagactggcaatctgcctttattattgcaaagccccrtagcttgttatcttcatgtacctcttgatcaagtatttaagtgaaataaagagtctaaatgttacgggaggtgagtccaggcagggtctacggccctcagtttttgtcttcctggaagaaaaaaattcagctgagagacagatgtagatttcagacagaagcaaaagtttattgaagcaaagtacatttggaagggaccaagtgggcaactggaaagattgagtgtcccgcctgattattggctcaggactcttataaagttactatttcctgattcttcctgatctcctcccatcatacttccttttgggccagctgttggctaatcgccgcgtgctcagtgacttgccagtaatctgggaggggctgcatgcgccatttggtggttgtagttatgcacatgtactctttgggcaattttcctttactggtctagtgcccccagaggaaggtcatataccagtcaaactttgccattttgccccttactgtgcatgcctgctcaattcctagggttttatcgcaaagttgttgcctacaagcttaagatgtttcctgttaggaaatttccccctccctggtgccagccatgaccatctatcattcctgaagaggccacctgacagtcacaatgacagtcatttgactgtctcctgacattccttggggccctatcctgccctgctcatatccacctatctacctaccctaacatattcccccctcaagagtgtgagactcaattatttggggctagtggatgaaggtcagtcctctgtggctgcttcctgctgaaataagggctgtatttgtcctctgggtctcaatctcttgctaattgtcagaacagaatggtcccatcggtaggtagaattggtgtccagccaggtccaggggaaacaggtgtatgttttcttcacatttgggtagggaggtagatattcctgtattgcagaatttctgctcctcagttcagctaaatccaggttctgtgtcacgaccaggaaaagttaggcatgcagacacgtggaagggtgaggggaatggaatttattatttattgggcgaaaaggaaaacaagaaaagaaaaactttcagcaaagtgagaggggtttctgccagcaggctcccatctcacagattggattccaagcccccacacacgagctaaagttcccaggctctttccccccaacaaggcatgaacttcctggtagctttaccccatcgtcgcagtgcacaggcgggcgggagattctccagggatcctccctcttatctgcctcctgcatctatcacctgcattattgggaacttggtttgaaattgttatatcctggagaagacaaatttatctagtaggttaaaaggcaggggccaaaaagaagtagacgtatggagacagctggttcgagcaggggaggaaccatgtgagcaatgggagagcagattttacagagttccagatggaatctgctgagggattttctttcccagagtcatgaagccacttagcgtggtcacagattctctttatatgttcctctacttgcccactattgttgacacaagtgcaatagggtttattgatgacagcacagacgactctgttctgcaaggaggtaatctagagctagtctgttgtccatgactgcattagctactgaattcagtgaagccttgagtttagagattctgttcccagttctctgacctaggtctccaatttgtgtagagaggttttggagggtgactttatgataactgaatcctctgtatggggcagctaatcctatggcagcccctagccctaccattataaggccaagagctctccttttttaagaatttgtaatgttatagatggttacacctgttccttgtggccccaggagtcctagggcacatcccctgtatgttgggtgttatctatgcagataaaaaggtttacaagtgagggggttgaataagttcttttagaacttccctcacagggcagtttattttgtttaggtccatataaaaatacatagcctggaggggtgtaggcccactcgggaatgttggttttgaaccaagtgtaagcataagcaatcccaccatgaataagatccagagtactggggctaccttatgctgagctagcattagtttgaaagaaaagaaggcattacttataatttcattgaaagagatattatagatcttccaatgactcacaggaatactcaggtgctggtcctattgttgattgttcagaagcctctcaaggttttatttaggaatgatgtatccaactagaggtgccaggaactttgatagctgttgcagtggaaaggaaaacagtaaaagggcctttccatgaggggattagttgagattttgtagatccatcactttaggttttaataaggacctgggtgggtacacaagttggttgttagagggtctggagccagcagtactctctgtatatatatttggttctaggtatgaaattctctgtcttggatttggatactttgtaccttacattttgctaggaagkttaaggtttgtactgcatattgttgtgcaagctttatggagggggagcagatgagtaagccatctacatacagcagaagttgtccccactcaagatatagcttggttagatttctttgctgggtcttgtccaaataagtgtggggcatctctaaaaccctgaggtaggactgctggctttcctgggagaaactgggatattagggggaaatatcagtccagatgttgggtaaatattaagtggatacccattttggaaagtatattcctactcaaaagcagtgtgaggcatttagacattgccagggactagtgggagaatagtaattagtcccataagcaatataaataaaggggatgtgaatctttagaggaaggggttgctacttgctcctgttacccaacagaatttgggggtaagttgcctagagaaaaaggttagcacaaagtaggcagttcttgtatttaaaaggatatttatagcactacctgtcatttccagagtttcccttggctctgttcctttaatgatgatgtctgatttggaagctggccagagtggagggccccttcagctcaaggccattattggatgggggttcaactgggggaccttttggatcccagggcagtccctcttccagtgggacttatctccagcttatcacaaagagggcaggctgtgtggggcttcctcccatttggcccatttggaaaattccttctccagtagcctggtcttctgcatcagtggcagttacctggaggagggtccttaggagaccctggagggggctggtgggcttgtaaagcagccaatagttgagcctgcatcttgtccctgcatttctccttttccttagccctgtcctccttgtccagatctcagttataaaagactgaggaggctaatttgaggatttgtggcataggggcactgggttctaaggctgacttttgtaaattttcctaatgtctggagcagcttgggtaaattgtcctttaggactagtccctcaggagattctgggtttaagtttggtgtgcttaataagtttcctgtagacttttcagaaaggctataggatttccatttggcccctggtttatggtggctaattattgtagtttagaggcttgatcttacttcattttattacctctattagacacaagagcctatggttcctggcccatattcccgctttggcattgtagtcctgattggggtccagctggggaacagctgtagcccctccagggtagttggcattttccaggtgtaagtcatttcgacagtggattgctgctccgcagatggtctgtctttcctcttgtaaaagggcttgtcccaggagtacatttatgtccttccaaattaatctaaatgtaagagccaatttggggaagccctctatgagccttttggggtcatctgagaacttttttaggtttttcctaagttgtcaaaagtcgtacatggaaaaggggatctggacctggacgagttcagttggctcacttacctcctacaagcttggagaggagaactaaggagcccggtgtaaagtggggccaattccaaaggtctgggagtgggataaatagggggaggatccaggggtggctgtttctccctctttcacctccaaaggaggaggtagtttttccttttggcttctggaggaagaaatgttggagaggaatcagcagaggagtctccagggccgatgcagggccctggaggagatggctaagcatagctaggatgtgaggtttgccttacaagctttacgaggattagggtcttccctttaggccataaaggtttgtaaataggggacctctggctttttgccctgataatggcagaaaaggtctagccggagaatggtattaaaatttgtacttccattctctagccagacttcctctgcaatgaaaaattagttttttcattttagggtttggtggttggatttatcgcagattttaaggatgcatccaaggggtcagtcccagagtatggagacaccgttatctatctgcaagacagaacagggaagagtaaggaagaggaaagagtcccttcttcttcatcttttttctttttctgtttttttttttttttttttttttttttgagacagagtctctctctgttgctcagctggagtgcagtggtgcaatctcagctcattgcaacctctacttcctgggttcaagtgatgcttgtgcctcagccttccgaggagctgggactacagatgcataccaccaagcccagctaatttttgtatttttagtagagacggggttttgtcctgaactcaggtgatccacccgccttggcctcataaagtgctggaattataagcatgagccaccacgcccagctgaaagcattccttcctgatccccttataccttggatcagagtagtgagtagggcatcccccattcatcctggagttctggaataaaccagtgattaccaggtaccactaaccctggtcccacatttccctccaggaccagccttcatctctctgctaatggtaatctgtcctgcacctgtggcctctggctgacctgtacctttgacactgtgatcttacagtgacctttgtttggagcattccagcaatgaaatggttttcctttctctcaaattcccattctccatatccctttaggtaggtgaggatcttatccctagccagcagctgtaagggaactgggccttcctttctctggacatagcactgtaggtcccagtatatgttaagaatgtagatggtcagaggaacagaggaaaacctgcatctgagtccccttgtcatccctcctgtggattcctggggaagcatggaaaacaagtatttaaaatgacaggacaatccatctgccacccgtgggaatggtagaaaataagggatattcatggaaggctgcttttgtacagtctcacaaacagcagcccttagacctaagaggacattgcctatcagtcttctcagtgtagaggaagaactgtcagggccagggagtttgggatgagagaccacaaaaggcagagaaagaattgtcctctccccaaagtgcagatagctctagaaaggaagtaggagttgctcttaatggaccacatacagatgccctatggagacaaacaaatgacctcaagagccactggaaaacctggtctcaatgtgtagcaggatttaaaaattcatgataggaaataaagaattggtggagacagagtcttcccaatattaagcagagaaagaagttgcatgatatgcagaatagaagcagggaagaggttgacttgcccccaagacagacagtgtggccagcatataaggccatctcaaagtccacagaaaaaaaggaagcataatagggtgtagacttattggggaaaagtccactttggttaaggaaatgaaggtctccagtctttgaatggcctaggctcaagccctatcacccttgtgagccacctgtccaaaagggccacagtgacttaggtctactcagtacagactctgaagtcctccacctctgctgtcgcccaccaggatgaactgaggaatctgctagagggaagagtgaccaaagagaatttttctggagatgggctggtgagtgagacagcaagagaaagaagacctcacgtaagcagagttgggtgcctccagccaaagatggcaaggcacagagggtcttaccgagaagctgcaatctgattcatgacaccaaaatgttactggcagcgggtttgggcaggatacacagtctttggttcttattgtctgagaagaaaaaatacatccaagagacagaagtagatttaagatggcagacaggaggcaggactagattgcagctctggacagagcagcatgtggaggctcgcattgtgaattatagctccagattgactgcaagaacaaaccagcaaccttgagaggacccacacaccctctgaaggaagcagactgctcttgcaggacctgggaaacaccccaaatactgtgagtaccccaactgtggaagtgggaaagggagaccctcctctcctgaacacacacccccactggagaagctgaaggtctgtttgcaagagaagtttctgactttacctggagctgagtcaatgtggagagctgagtgaaatacagaggcaaagaaagtagcagaaaggccctggaagctctctgagtcccctagcaggccatccatgcctggcatcacagggatccatccagagggcagccagagccagaggtgcaaggggtaaaactctacagggagaagaaaatctctagctgaagtttgtaacaatttgaatggggtgagaagcctcctggccagaactcaggggagggcacacatctggcgtgcagactccacaggtggagtagaaccaatccctttcattcacagctgggaggtgggtagcctggggcagattttcaagctcatcttgccctccaactgaaaatggactcaggctgttagagggtgggagacacagtgagagtgagactagccatttggtttgggtttgcgtggaagcagagtgaggcctgtgactgctggctttcccccacttccctgacaacctgcatgactcagcagaggaagccataatcctcctaggtgcacaactccagtgacctgggaatctcacccccatcccccatagcagccctagcaagactcacccaaggagagtctgagctcagacacacctagccttgcccccacctgatggtccttccctatctaccctgggagtggaagacaaagggcatataatcttgggagttctagggttcctccccatactaccacagctgatgctctctggaaggcaacacctcctggcaggagaccagccagcacaaaaatagagcattaaaccacgaaagctaagaacccccacagagcccattgcgccccccaacccctaccccctgcaccagaacaggcactggtaacctataaaggaaaatctgtgagattaacagcagatttctcagcagaaagcctacaagctagaagggactggggccctatcttcagcctcctcaaacaaaacaattatcagccaagaattttgtacccagtgaaattaagcatcatatatgaaggaaagatacagtctttttcagaaaaacaaatgctgagaaaatttgccattaccaagccaccactacaagaactgctagaaggagctctaaatcttgaaacaaatcctggaaacacaacaaaacagaacctcttttttttttaaattattattattatactttaagttttagggtacatgtgccatgccggtgtgctgcacccattaactcgtcatttagcattaggtatatctcctaatgctatccctcccccttccccccaccccacaacagtccccagagtgtgatgttccccttcctgtgtccatgtgttctcattgttcaattcccacctatgagtgagaacatgcggtgtttggttttttgttcttgcgatagtttactgagaatgatgatttccaatttcatccatgtccctacaaaggacatgaactcatcattttttatggctgcatagctttccatggtgtatatgtgccacattttcttaatccagtctatcattgttggacatttggattggttccaagtctttgctattgtgaatagtgccgcaataaacatacgtgtgcatgtgtctttatagcagcatgatttatagtcctttgggtatatacccggtaatgggatggctgggtcaaatggtatttctagttctagatccctgaggaatcgccacactgacttccacaatggttgaactagttgacagtcccaccaacagtgtaaaagtattcctatttctccacatcctctccagcacctgttgtttcctgacttttgaatgattgccattctaactgatgtgagatggtatctcattgtggttttgatttgcatttctctgatggccagtgatggtgagcattttttcatgtgttttttggctgcataaatgtcttcttttgagaagtgtctgttcatatccttcgcccactttctgatggggttgtttgtttttttcttgtgaatttgtttgagttcattgtagattctggatgttagccctttgtcagatgagtaggttgcgaaaattttctcccattttgtaggttgcctgttcactctgatggtagtttcttttgctgtgcagaagctctttagtttaattagatcccatttatcaattttggcttttgttgccattgcttttggtgttttagacgtgaagtccttgcccatgcctgtgtcctgaatggtaatgcctgggttttcttctagggtttttatggttttaggtctaacatgtaagtctttaatccatcttgaattaatttttgtataaggtgtaaggaagggatccagtttcagctttctaaatatggctagccagttttcccagaaccgtttattaaatagggaatcctttccccattgcttgtttttctcaggtttgtcaaagatcagatagttgtagatatgcggcattatttctgagggctctgttctgttccattgatctatatctctgttttggtaccagtaccatgctgttttggttactgtagccttgtagtatagtttgaagtcaggtagcgtgatgcctccagctttgttcttttggcttaggtttgacttggtgatgcaggctcttttttggttccatatgaactttaaagtagttttttccaattctgtgaagaaagtcatgggtagcttgatggggatggcattgaatctttaaattaccttgggcaatacggccattttcacgatattgattcttcctacccatgagcatggaatgttcttccatttgtttgtatcctcttttatttcattgagcagtggtttgcagttctccttgaagaagtccttcatgttgcttgtaagttggattcataggtattttattctctttgaagcaattgtgaatgggagtttactgatgatttggctctctgtttgtctgttattggtgtataagaatgcttgtgatttttgcacagaacctctttaaagcgtaaatcacaaaggacctgtaaaacaaaaatacaagctaaaaagcgaaaacaaaacaaaacaaaagtatacaggcaacaaagagcatgatgaatgcaatggtacctcacatttcgatactgacattgaatgtaaatggcctaaatgctccacttaaaagatgcagaactgcagaatggataagaactcaccaaccaactatctgctgccttcaggagactcacctaacacataaggaccaacataaacttaaagtaaaggggtggaaaagactttccatgcaaatggacaccaaaagccagcagaggtagctattcttgtgtcacacaaaacaaactttaaagcaatagcagttaaaagagacaaagagggatattatataatggtaaaaggccttctccaacaggaatatgtcacaatgctaaacatatattcacttaacaatggagcccccaaatttataaaacaattactaacagacctaagaaatgagatagacagcaacacaacaatagtgggggacttcagtacttcactgacagcactagacaggtcatcaagacaaaaagtcaacaaagaaacaatggatttaaactgtaccttggaacaaatggacttaacagatatatacagaacaactgcaaaatatacattctattcaacagtgcatggaactttctccaagatagaccatatgataggccataaaatgagccttagtgaatttaagaaaattgaattatatcaagcactctgtcagaccacagtggaataaaactggaaatcaactccaaatggaatcttcaaaaccatgcaaatacatggaaattaaataacctgctcctgaatgagcattgtgtcaaaaatgaaatcaagatggaaattatacaattatttgaactgaacaacaataatgacacaacttatcaaaacctctgggatacagcaaaggtggtgctaagaggaaagttcatagccctaaatgcctacatcaaaaagactgaaagagcaaaaaagacaatctacagtcacacctcagggatctagaaacaagaacaaaccaaacccaaacccagcagaagaaaggaaataatcaagatcagagcagaactaaatgaaattgaaacaaaaaaaaaccatacaaaaaaataaataaataaatgaaacaaaacctggttctttgagaaaataaataaaattgatagaccattagcaagattaaccaagaaaagaagagagaaaatccaaataacttcactaagaaatgaaacaggagatattacaactgacaccactgaaatacaaaagatattcaaggctactatgaacacctttatgcacataaactagaaaacctagaagagatggataaattcctggaaaaatacaacactcctagcttaaatcaggaagaattagatacactgaacagatcaataacaagcagagagattgaaatggtacttaaaaaattatcaacaaaaagaagtccaagacccgacagattcacagcagcattctaccagacattcaaagaattggtaccaatccttttgacactattccacaagatagagaaagaaggaaccttccctaattcgttctatgaagccagcatcaccctagtaccaaaaccaggaaaggacataaccaaaaaagaaaactacagatcaatatccttgataaacatagatggtaaaatccttaacaaaatactagctgactgaatccaacaacatatcaaaaagataatccaccatgatcaagtgggtttcataccaggggtgcagagatggtttaatgtacacaagtcaataaatgtgatacaccacataaacagaattaaaaacaaaaattccatgatcatctcaatagatgcagaaaaagcattcaacaaaatccagcatccctttatgattaaagctctcagcaaaatcagcatacaagggacatacattaatgtaataaaaactatctatgacaaacccacagccaacgtaatactgaatggggaaaagttgaaagaattccctctgagaactggaacaagacaatgatgcccactctcaccactcttcttcaacatagtaatggaagtcctagcaagagcaatcagacaagagggagaaataaagggcatccaaatcggtaaagaggaagtcaaactgtcactgtttgctgatgatatgattatttaccttgaaaactctaagaactcctccagcaagctcctagaactgataaatgaattcaagaaagtttctggatacaagattaatgtacacaaatcagtagctcttctatataccaacagtgaccaaggggagaatcaaatcaagaactcaacccattttacaatagctgtaaaaaaaataaaataaaatacttaagaatatacctaacaaaggagtcgagagacttctacaaggaaaactacaaaacactgctgaaaggaatcatagacaatacaaacaaatgggaacacatcccgtgatcatggatgggtagaatcaatattgtgaaaatgcccatactgccaaaagcaacctacaaattcaacacaatccccatcaaaataacaccatcattcttcacagaattagaaaaaacaattctaaaactcagatggaaccaaaaaagagcctgcatagccaaagcaagaccaagcaaaaagtacaaatctggaggcatcacactacctgatttcaaattatactataaggccatagtcaccaaaatggcatggtactggtataaaaatagacatatagaccaatggaacagaatagagaacccggagataaacccaaatacttacagccaactgatcttcaacaaagcaaacaaaaacataaagtggggaaaaggataaccttttcaacaaatggtgctgagataattggctagccacacataggagaatgaaactagatcctatctctcaccgtatacaaaaatcaactcaagatggattaagggcttaaacctaagacgtgaaactatgaaattttagaagataactttggaaaaacccttctagacattggcttaggcaaggatttcatgaccaagaacccaaaagcaaatgcaataaaaacaaagataaatagctgggacctcattaaactttacgagcttttgcagggcaaaaggaacagtcagcagagtaaacagacaacccacagagtgggagaaaaatcttcacaatctatacctctgacaaagggtagtatccagaatctacaaggaccccaaacaaatcagtaagaaaaaaacaaacaatcccatcaaaaagtaggctaagggcatgagtaggcaattcacaaaagaagatatacaaatggcaagcaaacatatgaaaaaatgctcaacatcactaatgatcaaggaaatgcaaatcaaaaacacaaaatgtgataccaccgtacttctgcaagaatggccataataaaaaaattttaaaaaacagtagatgttggcatggaaggggtgatcaggaaacacttctacactgctggtgggaatgcaaactagtacagccattatgggaaacagtgtggggattccttaaagaactaaaagtagaactaccacttgatccagcagtcccactactaggtatctacccagaggaaaagaagtcattatttgaaaaagacacttgtacacgtatgtttatagcagcacaattcacaattgcaaaactgtggaactaacccaaatgtccatcagtcaataagtggataaagaaactgtggtgtacagatatatatacaatgaaatactacacagctatgaaaaggaatgaattaacagcatttgcagtgacctggatgagattggagactattattctaagtgaagtaactcaggaatagaaaagcaaacatcatatgttctcactgatatgtgggatctaagctatgaggacacaaagatataagaatgatacaatggactttggggacttggggggaagagtgggaggggggtgagggataaaagattacaaatatggtgcagtgtatactgcttgggtgatgggtgcaccaaaatctcacaaatcaccactaaagaacttacttatataactaaatataccacctgtaccctaataacttatggaaaaaaattttataaaaagtaatagatttaagtcagaagtttattgaagcaaagtaaagtacattcggaagggaccaagtggaaaatttaaaagattgagtgccccgcttgatcattggttcaaggcttttatagagttactgtatcctgattcttcctgatctcctcccctcatccttcttgggggaactgttggctaatccttgcatgcgcagtaacttgctaatatctgtcaggggctgcatgtgccgtttggtggctgaagttgtgtgtatgctctccatgacaatttttcgttactggtctagtgcccccaaaggaaggtcacatatcaggcaaactctgacgttttgccccttcttgagcatgcctggacatatccccgaaggaaggccaaactccgccattttgccccttactgcagatgcctggtcatgtttgcttagttcctgggatcttatgaggaagttgttgctcataagctcaagatgtttcctgtttgggaggaaattttccccttcttggtgccagccatgaccatctgtcattcccaaggaggcccctgacaattgcatgacagtcacctgactgttgcctgacattccttggggcactctcctaccctgctcatatctgcctatctgcctaagtaacatgaagacattttaaaccttctcagtggttctcccatttcttctctctctctctcccccactttcccttcaaaccacctcaaaactcctttctatttctactcagcaaaatggagattaaaacctcactaaaatgtgtctttgcccacccctgccttcccatttcacagcgcacttctttcttcaaacagatttagatttacagaggaaaaaaggcagaaattctctttaccggcttcagacacttaaagaaaatctgtccttttcatctctacacgttaaaatatttgctataataagtgtagattcaagagccatttggacatatctggcttttaaatagtgttgactaatgaccaacttaacttagatctttgaatctatgtgtggtgttatgatatatattagttttcatctgaggtctagctcataactcccacagcccttgttacagtcttttgttataatgttgggtgtgttaggcctcaggggcaggcccctgaccttctccttctctcctttcacctgttcctgcctttctgattgtggcttttaagaccttccccagagagagtactgccctataccctgggggaaggaatgctgatgtcatgaagcctccataaaatcccagaaggacagggttcagtgagcttccacatagctgaacacttggactttcatggaggttggcacagccaggtaaggcatggaagctccacaccccttcccccatacctcaccctatatgcatctcttaatcggtaacatttgcaatatcctttataataaactagcaaacataagtaagtgttcccctgggttctgtgagccactccagcaaattaattgaacccaaagagaggattatgagtatgccaacttggaggtggccggttagaagctccagaggcccacacttgtgactggtgtggtggggggcagtcttgggaactgaaccttcaaccggtgggatctgacattatctccaggtagacagcgttggaactgaattacaggacacccagctagtgttggctgcttggtgtgggggggaaacctcacatgtttgttcgtagaaggcttcatctgtgttgatgatttttgtggtgtgagagtagaggaaaaatgccatcagggagagttttctctacaccctatagctcctagatgctttttatttaagacattcaaaccttgtgaaaaacaaacaaacacaaaaatctttttatttaagacggtcaaaccttgttcaaaacagcacagacattaactcggaatttaggatttattattgattaattgacattatcttcagtctgttcatattattaagtgatataagtcaggtacacacacacatgtatggggagtgtgtgggagtgtctgcatgaagtatactgtcagaaaatatactcatttcaaagaaacactgatttaggccctggcaaataaggaaacatttctatttcttctagaaataacacattcatttgccaacatctgatctatccatatgacctcttaatacacacatgaaataataaagtgtatttttcattcatttaataagcatgtgattcacgtgacactgtaagccttttttttttttttttttttttttttgagacagaccctttttctgtcgcccaggctggagtgcagtggtgtgatctctgctcactgcaacctccacctcctgagttcaagcgattctcctgcctcagcctcccaagtagccgggactacaggcacgggacaccacgcctggctaatttttttgtattttttgtagagacagggtttcgccatgttggccagactggtctgaaactcctgacctcaggtgatctgcccacctcggcctcccaaagtgctgggattaaaggcgtgagccactgcgcctgggcgagcatttttttttattccagtgtttctcgttaatctaccccatggcgttttatttcaggttgtatgtatgccagagatgaaaaaaggcaaatgacagaagagcaagtatatggagaaagataggagggacttgagaaaacttggcaatttactaaaatgaaatggcattgtttccatatttaccaaaaacagacaaacaaacctaatcattcctctcattttgatcagctttcatgtatattttctaggcctaatcaaaatcttctttggtgtcacaaaataatggaagagacatgtattggtttaggctcctgcagcagtagaccccaatataaggaatattagttgtttatttaggaaattcaagaaacctaagtaaaggagtagggaagtgagacaggaaatggaaggatctctgaaaaaatacacatcatcaagtccgttcccacagagggaaacaggagctcagtccccattgttgggttctggaagacagtgtggaacagaccccagagttatcccaactgtgagatgaggaagctggggtgcttttcaccaactcttcatccatcacctgcttccgggggtcattaacaatccaccactcccaggttatttatgctcaggccaggcatgtaactgcagccagaaaatagcccttgccaagactcacaggaattaaaaaccttcaggcaaggagctactggtctttgtaataataagctttgagaggcgggtattcagaggctatgggcaccaataacttcccttatgtgagtcataaacacaaagttaattttgtttgcatgtgtatacaagtattttgaatgaatgcttctctttgttttgtgtgtttggaaaatttaaacaaaattattattgtttttgtattggtatttaaacatctgaatatgtaacatcaaagatgatattaaaaagtataaagcaaattatcacaaaatcagatgtgcagttacatgtttacttgaaattctctctagactacatttgaaataggagcttccatagggggaaatttaaattttttttacaagttgtttaattataatgtgctttaaaaacactttagcatatcataaaccttcaaaacaaaatgagtaatcatcttctgagatccatagaaaatgtttcttaaatgtcactttcaattaccacttctggagctaacttgcaaaacaattgtgtttccaccaactgaaatatgttttcaccaaatttaagataatctgtggtcagtgtgagctttgtcttgatttaggaggaggaaagcaaagttccatttatgaatactttgaaaattttcagaaattctcctaaattgtttcagcaaccaggccaaaagagaggcctggaatcccaaggtgagaggaaactttaaaagttacacttatggccaggcacggtggctcacaccgtaattccagcactttgggagactgaaatgggtggatcacttgaggccaggagttcaggaccagcctggtcaacatggtgaaaccccatctctactaaaaatacaaaaattagcctggtgtggtggtgcatacctgtaatcccagccacttggcaggctgagacatgagaatcacttgcacccaggagacagaggctgcagtgagtgagatcatcccactgcactccaacctagacaacagagtgacactctgtctcaaaaaaaaaaaaaaaaaaaaagtttcacttgtgccttggggttggctgcctgctatcatatttttgttgtgttcttctaccccaagctccagtacctcccctcacagaaatcacctctcctaccaaccccaagggaacccattccatttttattagagagttcttctttacatggcctcaagtcttttcatcaagatttactgatagaataacagtaaatccacattactccaggtgtctctttgcccttacctagcctttgtgtctatgccattcttctcaaggaaattgccttcctttatcagctttaaaagtccatatttgggatcccctctcctggaaacattctctgactatccagcccagataattttttttctctgctttctcattataacattcatgatctgtgtcattcattcattcattcatttgcccaatatttcttgagtgcttcctaagttcaggcactgttctaggtactggggacataggaggatagaagccagtcaaattttgcactcactgaaactttactttagtaggtaagaatctatagtttaaaaaaaaattcacatatgaggcctgtgaagcaaataaagcaataatgtggtggttttcatggacattatgtctttcactacccgtccctctttttgttgtaaactctctaaggcaagtataacctcatctatacattagtatttatttaccacaaggacccataagtatttattgatatatcttcctaagtatgtgataatattctaaatagatagtagatttaatcattgggatttatgtgaagttggattaaatagataacatgataattacatttagtattgcatggaaggacacattttctcacttatagaagcctaaacaaatgtcacaatgttgatagattcctttataggatgttaactctgaagctgtcgtgaaaatgtgtgaactagtttcactttcaacttgatccttttggaatcatgacagattttgctagcccttaattcttctgcaatctttgttgatccctcctatttcaatctcataagacacttatctctcctccagaaagatctgaagggttaagtcacctatttatacctaattacagtgagccctgtgttggatttttaagggataaaaggaagtatcagatctcagttaacttatgtactgtctacagtgcctaacaatgacacaggatgactcagttaaggagaaaaatactccatttatcagcacagaattcttccctttaagctatcatatggtagctaaccttgcctaaccttgcgagtttaaccttgctttttacgtgcatgcacgcgtgtgtgtgtgtgtgtgtgtgtgtgttactaatttctaactgtaccagctcctgaattaatatttggcaacatcaatattccttgtataatgaagaagcatggtccaagagacttggatgtgacctctctaaacatcaacttacagctgcaaaataaggaataagttgtaattattccttatttgtaacaactaccttacagtgttgttttgaagattagaagagaatatatagatgaagtacccagtggacagtaggtattgaataaatgttagtttccttccaccttctctggcttatgtaacaaaattactcattctactagtcactcagactttagttaatcattagctaaagagtaacaatgcaggattttttttttaataaattggctaggattggttttatgcctggatggaataggcacttgccatttcatcacaattcaaaattcctcctgaaggcctgaaggcctgaaatgtttaccattggaaactaatcccactgtatggttactattatttattatatctattaacttataaaatattaaaatataaagtaaatattaccctactgatgcattagccactcaacataaatgagtttcttggagattaataaagcagtacatcagtatgtcccaaacaatggctaaaaggaaacctagtaaccaccccgaccccaaacttgttttgttaggccagtcagatttttttttttcattttgaattagcatcacgattgaaagtggaaagatctcacatataacttcacatttctctgtacaattgagaaacgttggctatgttggctctctgaatagcagctacctcctttcaaggtttgtatttacaatatttcccacccccatgagtccttattatcctgacactgaggacaaatatgagttgctgtccatcagcattccaaagctgtttttttttttgttttttttttcttacacttagcctacttcactccctaacaccaccagcctgatttctgagggggcctgaggtaggaggaggagaatggagagcactttctctgagagccgccattttaacagatcattaaagacacgatattcacatgacggttgcttactctctgatgaaaactacaaaaacagaatacacagggaaggtaatctgaaggtgatacctttttcctatgatccttggccttataaccactaatcaagcctgagggccgaagttcctgcctcatctctgcctgatgttacgaactaggcaggctagcagaggcaacaggcaacctgggcacctgaagagctacctggataacctagaagaacagtaggaggttaaagatgaggacaagtctatcaaaacaaaagcctgtcaagaccagaaagagaaagtcacacttttgactttacagtttgtgctgggctgacacaaaggcctcagttaacaccaaatacaacttccatagacttcaagtttccctcatatttttcctgggtcactattccagagttgagaaactgaactacatctaatattttattaaaataaaattgaagattattagaaaagtttattagtcaatagtaaaacgttatttggttagctttcttaaacaatggcatttatagatatctgattatcccaacaaaaatcttcaaatggttcatggacgctttgtcaagcttttgtgccacctgagagaaaaaaagataaatggggaggtataatgttaattttgtagcctttgcttaatgtttatttttgaaatgcctatcattttctatcagtatctgaaactccatggatttctattagccttcaccaataattacatttgaaagcatccagaagagacaatccttaccacagtctcttttaaactcttaatggctgtcacaaaattctatttttcattttctctaagagcattctattaaactgttcctagttattagctttcataaaggcacacagaaaatgtttcctctacagccacaaatattcctaaagcagaatcatagtaaaacagctgtgataatgttttattcattccagaatcctaatgattgaacaaaagagagacagtcttaagagttaacatctattgagtccgtgactgcgtgcattgttctttcaagtattttacctgcactatttaatgtaattctcccagccactctgatttcactcattttacaattgaggagactgaggcatagaaaactaaagcaatttggctggagtaagggccaggttgggacttataccttggcggtctgcctacaaggtgttcctcaccaccatctgacactgctttctctgtgtagcccagagtgtcagcctcagtgcttcaacttgagctttcaggatctatttaaagatggaaaatatagttacattatgtcaccatttgagatgcagaaagacagggccaccattttgcacaattctgaaagcacaattcatgctgtggtttgtaaaaatggtactccctagagttgggcaatggacagctcacacagagatgcagtggccctgctaaactaatgccttacataaaagagttttactcttcattcccttaaatgattcttagtaacactggctgacacacacacaaaacagtttctaagtaggtctgtccgcatactatgatcactggtcaacattaagtttccacaattaattttacataatccaaagactgccaagcagtttatctgggtaaactaaacattctgtagtcatttattctgcttccagtcatgcccagcaacaggttgagaagacaaatgttctcagaaatgatctccaaggagttgggagcaggctgcttatacgtctaattcaccagaataggtgagcgtggtcgtggtgaccttttcatactgttgcagagctgagtatgaagagatgactcacagtcctccaatgcaacacaggtgaccctgcagccagattttgccttcagtggtatgtgactcccatggggtcaggagagtatctcagacattgaaatttgacctaatggcctacctacctgcacacgcaccctgcccacttacagaagggcaagaactctgcattactgaggccttgttattattatagttcctatttaggtaagaacgcaatggagaaaaaatgcatttggttattgggcctctgtttgaatatcctgtgctttttgccaaacaatgcattctacataatcttaaaaaacaaagtccatttcaaagaacaaaaataatgaccatatccactgagcaattgagcagaatgggaatcggagttttaaactctgatatatctgttttccttagggctgaaatcttcttttcatggttctagtttctctaattgaaataagaacctaaccctgttcaaaactacatctctgggaatgagtgaaaaattaatgatcctcctattttgttggatcataataatgactctcatcctggtggggccaccagcaatgctattcttctcagactctatcttagttcctaagccactcaccaggtatttaaaagaatgatttaacacaactagaatcatttaaataactgtattttttaagaaagccatattattgctttagtttggtcattcatatatccaaaccttggactcatcatcttgcaatctcatgtgttcagttattccagagaaaacattaaggagaattgtattcttcttcccagctaaattttaggtcctcaaagctggcaaccacaatttatgctttctaaaaatcatctatgatactaagtatgagctggatcatgaataaaacccttgtaacaataaatgcttgatgacttacttcatctcattagcaagggaaggtaactcataattatcaaggtactacaggaaatagggcactatctggaaatgctaaatacatctccttgcatgaatcacttcttaccagaattccctttctttccagatcccacctccagggttctgtggtccataccaggcactacattcctcaggggctacagcctatgagcgtctcatggggctatgaaaccatttgagacctggaaaatgaagtaattgaatacaaacagaaaactgcaaaatgaggactaacatttaattaaatgttcaaagcataagattatgtcgacttcaataattgtcaaatgagtattcttaacattttactaaattaaaaaaacttatgtgctgagttttttattttacaagtatctccaagtatgctggatgattgcaaagaaaatcaaggccagtcattggttaaatgagtttaatagtagccacataatttcaaaagcaaaattataaagacccttcccagactgttgatagcaaaaataatctacgttgtggaaagtgggtccatgttaatatgttagatataagtagtgaggcctaaaaaggtattaaaacatctttgcttaaggtactacctatttgcaagattgttattttaaaaatagcttatgttttaaattgttattgctttttatcactctaataagaatttatagttgctgtaagataacaagaaaaaggttaactatctgcagagatgcctgagagtcagccagggagtaacttaaatcctgcaggaatctgactcactgaagactgtcaactgaatgaaggcttaaatttcatggtcttgggtgggagaactttttcatattctttccccatatggaataacaatctgccctgaaaacagggagtattttggcatgatctctttttgcttatttgccttccattttccataaagcaacttttgccaagcaccatacttaagactcaacttttttgcaaaaatatcagacaaagcactgtctttaagaacacagagaacacactagatcccttcttctgaaaatcactgttctatgttgtttgtggatatttttttagcattcactgcatgcctggaatgaataggctgtgtttctccccaaaagagcacaaattaatatacaaggtcaggttaaatagttaagtctgctttcctatcccttatacagaagctatccattcaaaaaaaaaaaaaaaaaacttctttttactttttttaatttttaattttggtgcatacatagtaggtgtatatatttgtggaatacatacaaacatacaatgcataataatcacatcatggtaaatgggtatgcatcacctcaagcatttatcctttttttatgttacaaacaatccaattttaccctataattgcttaaaaaacatacaataaattgttaactatagtcaccctgttgtactatcaaatattagctcttattgattctatctaattacatttttttatacccgctaagtatcccacccttccctccacgctaccctacctaacctccggaaactgtcttctgctctctatctccttcgtttgttttaatttttagctcccacaaaaagggagaacatgtgaagtttgtgtttctgtgagtaacttatttcacctaacataattatctccacttccatccgtattgttgcagatgacaggacctcattcttttttatggctaaatagtactacattatatatatgcaccatattttctttatctatttgcctgttgatagaaatttagattgcttccaaatcctggctattgttaatagtgctgcaataaacatgggagtatagataactctttgatattttgactttctttcttttgggtatgtacttagcagtgggattgctagatcatatggtagctctatttttagtcttttgaggagtcttcaaactgttctccatagtggttgtactaatttacattcccatcaaaagtgtaccagggttcccttttctttacatcctcaccagcatttcttattatttgtcttttgcataaaagccattttagctggagtgagatgacatctcacaatagttttgatttgcatttctctgacgatcaatgatgttgagcaccttttcatatacttgtttaccatttttatgtcttcttttgagaaatgtgtgttcagatgttttgcctatttttaaatcagattaattttttcctgtagagttgtttgagcttcttatatattctgattattaatcccttgtcagatggatagtttgcaaatatttcctcccattatgtgggttgtctcttcactttgtcaattgttcctttgctgtgcagaagctttttaatttgatgtgatcctatttgtcccatttgtccatttttgctttggttgcctatgcttgtagggtattacttaagaaattgttacccagtccaatgttctagagactttcttcaatgttttcttttagtagtttcatagttcagagtcttagacttaagtctttcatccattttgacttgatttttgtatatggcaaaagatagaagtctagtttccttcttctgcatgtggatatccagttttcccagcaccatttattaaggagactgtcttttcccaaagtatatacttggcgcctttgttgaaaatgagttcgctgtagatgtatggattcatttctgggttcaaaactggtattccagttttgttctttttgctcgggatacctttggctattttgagtcttttatagtttcatataaattttaggattttttttctatttctgggaagaatgtccttggtatttttatagggactacattgaatctgtagattgctttgggtagtatgaacgttttaacaatattgatccttccaattcatgaatgtggaatatctttccatttttttgtgttctctttttttccattagtatttgatagttgatagatcattgtagacttttttggtttagttaaccctaggtacttaattttatttgtacctattgcaaatgggattactttctccatttctttttcagattgttcactgttggcatgtagaaatgctactaatttttgtatgtttgttttgtatcctacaactttgctgaatttatttatcagttctaatagtgttttggtggaatcttcaggtttttccaaatttaagatcatattttctgcaaatgggataatttgccttcttcctttcaaatttctttctttggtctgattgttctagcaaggacttccagtattattaatatattgaatactagtggtgaaagtgggcatccttatcttgtcccacctcttggaagaagagtcttcagttataccctattcagtatgataccagctgtgagtctgttatatatgacttttattgtgttgaggtatttccttttatacccgattttttgaggatttttatcatgaagggatgttgaattttatcaaatgcttattcagcatctgttgaaatggtcatatggtttttgtccttcctgtcttccttttagtaaaagtgattttctctggtggcgtgttttaattttttgctttttattttttgagaacctgttgtatattttttgatttgcgattaccaggaggcttgtaaataatatattgtaactcattattttaaactgataacaacttaacactgattgcataaacaaactaacaagcaaagggaaaaccaataaaaactctacattttaactttgtcccccgctttaaaactttctgttgtctttatatcttattgtattgtctgtatttcaaaaaatagttgtagttattatttttgatcagtttatcttttattctttctatttaagatatgagttgtttacatactataataacagtgttataatattctgtgtttttctgtgtatttactaatgctagtgagctttgttcctccagatgatttcttattgctcattaatatgcttttctttcagattgaagagaattctttagcatttcttacaggataggtctggtgttgatgacatccctcagcttttgtttgtttgggaaagtcttgatttctccatgtttggagaatatttttacaggatatactagcctgagataaaagtttttttccctttagcactgtgaatatgtctcctgccctataaggtttccactgagaagtctgctgccagatatattggaactccagtgtatgttttttctttattttttcttgccgcttttcagattctttcttatctttgacctttgtgagtttgagtattgaatgccttgagctagtcttctttgggttatatctgcttggtgttctataaccttattatacttgaatattgttatatttctctaggtttaggaaggtctctgttattttccctttgaataaattttctacccccatctctctttctaacttttttttaaggtcaataactcttagatttgcccttttgagactattttctaagtcttctaggaatgcctctttcttttttattattttttcttttgtcttctctttgtattttcaagtaggctgtcttcaagctcacagttctttcttctgcttgattgttttgtgctgttaagagactctgagacatttttcagtatgtcagttgcgtgttttaactccagaatttccgcttgattcttttaaattattttaatctctttgttgaatttatctgataggattctgaattccttctgtgtgttatcttgaattccattgagtttcctctgtctaaaaggtcacatatctctgtctctccaggactggtcactgatgccttatttagtttgtttggtgatgtcatgttttcctggataggctttatgcttgtggatgttcgttgttgtctgggcattgaagagttgggtatttattgtagccttgcagtctgggcttgtttgtacctgtccttcttggtgaggctttccagatgcttgaagaaacttgggtgttgtggtctgagttttgggtcactgcaggaatatctgcattagggagcactccaagcccagtaacactgtggctcttgcagaggtaccaccttagtagtcttggataatatccagagtcattctctggattaccaggcagagactcttttttctcttctcttactttctcccaaacaaacagattcagtctcagtctgtctgtctgtctgtctgtctctctctctctctctctgtgtgtgtctctgtttcctggatctgggggaggggtaacacaaatacccctgtggccaccaccactgggactgcatagggtcagacctgaagccagcatagcactgggtcttgcccaaagcctgcagtaaccactgcttggctcctgcctatgtttgctcaaggcactagggctctataatcagcaggtggtaaagccagccaggcttgtatccttcccttcaagacaactagttcctcctagtcctgggcaggtctagagatgacgtccaggagccagggcctggagtcagaaatcttaggaatctaccggtactctattctacggtgggtgagctggcacccaagtcacaagacaaagtccttcccactcttccttctcctttccacaagcagaggagtctctccctgtggccaccactgccccaggcctgcgacaagtactgtctggctactgctgatgttcattcaaggcccaggggctcttcaatcagcttgtggtgaatgctgccaggcctaggaatctattttggggcagtgggcccacctgtaagccagggaaggtccagaaataccatctaaagccaagccctggaatcaggaacccctagaacccctttggtgctttaccctgctgtggctaagctggtacctaagctgatttttggttcttatgaaggtgcatgaaggtgcttttttgtgtggagagttgttcaatttgttgttcctttgggaggctgctatttagccatatggctccacctccctctccatccaaaaagaaaactttaaatgaaaatatacatccaaagaaagtgtttttgaaataaaaaataaatggtcttaattccaaggaaagaaccaacatagtaaagtaaaaatgcattttttccaaaagttacttgtttgatcacatattgtattttattttaatgaaatatctagaataggtaagtccatagagaatacaaaacaggttagtagttgccagggaatgtgagtgtgcagaatgaggagtcattgcttaatggcactgttttcaagagttacttttgagtacacttgcagtctggtatctaaataattgaaatatttgaaagtcgtgattcctagaataaaaacagtgactaacttttaatgatttcaatgtcatgtgcacaaaaaaaccatgtccagagtaataagtttacccattctaccattcttttcaaagaattgcttaaataagttttaaaaaatttcctattgagatgttacttaaaatacgatttgtttagttctcaaggttatgctttccccaggttatgcttcatttgggtaatctaagtttaagtcctaatgtaagacctagggcatggtacttaacttcctgtagacctcagttttcttgactgtgtggtggaagaaataatagtacctagcttgtgagtttgttttaaatgttaaatgagagaacatgtggaacatcttacccagtgcctggcacatggtgagcaatcaataaatgggagttcatcctgtcatcttcagatttctcttctggagccagccaggcttgagttctgacctggttcatccactgaacttgtaggggaagcacttagtgcccttcggtcctctcatccagtacatggatatacagtcttcatgtggttgatacaaatacgaatgtgctaatgcatctttaccaaaaagagaggtaaaagaaaggaaggataatcctgccagagatacatatgcaaagatctgaaagtaatcgagagtgaggggttgcagattggacaacacttagtagtggctccagataaggttcttaaagactggccaggatgcagccttttcatccagagaaacagccatctcattcatagacagtggtgactgattggcagattttataagatgacacaaacaccctccccattgtcctgccaaaatgtggggaaactcttcctggaaaagttatttctttgaattgagcttccaaaaggttcctattagaattcaaatactctgtctgggttgaatatcacattgcataatagtttctccagattaaggccatttttcctaaatatttaacaaaaaatttttcgcttcttatcaatgatgctggcgttggttcagtgcctgcataagacttcttccagtgtatttctttaccctggcaaccagttcctttttctttgggagaattttttttttaattataacactattgtaggaactcctttttggcacagaaggcatctaaagtaacttttagagatagaggcttatgaaaaacaagaaagaggcaagactcagtttttgaaatctaattccagccatgaagcaaatgccacaaaagggcacaggaagaaaatctgtaaagggcttatctaccaccgttgaccaaagatttattctgctgttaagcaaataccttgtaagccagatattgtgctaggtattctgaatacaaagatgcagaagcctcattccctgttttctttttttttttttttattatactttaagttttagggtacatgtgcacattgtgcaggttagttacatatgtatacatgtgccatgctggtgcactgcacccactaacgcgtcatctagcattaggtatatctcccaatgctatccctcccccctccccccaccccaccacagtccccagagtgtgatattccccttcctgtgtccatgtgatctcattgttcaattcccacctatgagtgagaatatgcggtgtttggttttttgttcttgcgatagtttactgagaatgatggtttccaatttcatccatgtccctacaaaggacatgaactcatcattttttatggctgcatagtattccatggtgtatatgtgccacattttcttaatccagtctatcattgttggacatttgggttggttccaagtctttgctattgtgaataatgccgcaataaacatacatgtgcatgtgtctttatagcagcatgatttatagtcatttgggtatatacccagtaatgggatggctgggtcaaatggtatttctagttctagatccctgaggaatcgccacactgacttccacaatggttgaactagtttacagtcccaccaacagtgtaaaagtgttcctatttctccacatcctctccagcacctgttgtttcctgactttttaatgattgccattctaactggtgtgagatgatatctcatagtggttttgatttgcatttctctgatgaacagacacttctcaaaagaagacatttatgcagccaaaaaacacatgaaaaaatgctcatcatcattccctgttttcaaagaaactcacagcattatggaggcccaggtttctatttgggcctccataatgccttgtgctctaccaagaatggtaaaacaatcctttccagtaggagttcctagttagtggcttatagttaaccaaatgaagagaggatgaccatatggtgctgataaattgaaagaaattaggatgaacatctagagatttgcatggccagacacctaattcagattgcagagcagcaggatgggaggcgtagtcctgatttaactcttgatcaaaaagaggggtaaaagaaaagaaagataatcctgccagaaatgcgtgtgcaaagatctgaaagtgatcaagagcaagggattgcagattggacagcatgttttctcatttaatcccagaggaaccctgggaggattctaggtgtgcatattgtccttattttgtagaagaaggtactgaatcttaaagagataatgtgttttcaaagcttacagagtccaaatcgatagctaaacagtgtctgtgggatttgaatccccctgtgatgttcactgtgtgttgccatatactgcaaatgtgttataaaataataattataataaacaaaattaacctgagatattcccagattgaatcaatccaaggagactgaacttctgagtttgtcttggagttagttgggctttactgctacttatgctagatcttgaaggcagagtaggaaatatacttagcagggaagtgggagaaaggtgagaggttccccaggcaggggaaacaaagtgagcagatttggggcaaggtgtgtgagattgtgtggttggcaatatagggtgggaaaaattagttatcaagggcaaagctgaatagcagattgaacccaaatggtagaagtttttatttaacacacaaaaaaggctgaaattgatcctgtaaggaatatgaagctatagaaggtttttcatcacaggctttgacattttaaggtttgtatctttgaaagataatccaaagataagagaaaaaaaccttagatgtgtaaaatagaagtcaggaaaactacacaagctatgtgtaaagggagtcaaggggacaggatccaaaggaagacaaaagcacaaaccaattattttaaatcaaatactagtgcagtaacatatatttttaagttttaaagctgcttttctccatagcttattgattactcttttaaaacttatttttaatagcagatattatttattgattccttaccattttctagatactttgctaaggttttacatgtcttttttagtcctcagaaaattctcttctatctccattttatagctgaggaaactgaagccagggaaggttaaataatttgtttgcaatcaaacaactagtgattggtggaatttggatttgcaaccaggcagtctgactccaaaggcctcttcttaacttgatcctacatacccttcctaaatagtaggcgtttttctcagagcagctgttttacattagagaaaacttatttgtaatctgtgatcaaggagaaactgcctgagttgcctggattattttggcatttttaatatgtacaagaaaaatgttatcaaataaatgtaaatttaaaggtcctgatgagagtttactttctaataaaacaattttcaacatttcccattacatcagaaactaaattattattaaaacacatcttgtgttcatttatttttgacaggctgcttttcacatctttttttttttttttttttttttttgagctggagtttcactcttgtcgcccaggttggagtccaatgacacgatctcggctcactgcaacctcctcctcccaagttgaagcaattctcctgcctcagcctcccaagtagctgggattacaggtgctcgccaccacacccagctaagttttgtatttttttagtagagacggggtttcaccatgtttgccaggctggtctcaaactcctgacctcaggtgatccacccgtctcggcctcccaaagtgctgggattataggcatgagccaccgcgcgcagcctccaatcttattttaatgaaaatctcaatttatctcagtgttagaaactagggcttcatttggcaatgtggtctttccagttgtttcatctctttcaaaagtcttttaagaattattgaagtaagttaattttaaatttttgctttatcccttgagattggtatatagagttaggaactacttgattaaatacaggaagctactataaatttgaaataagaactaaagttataatgtgaccagactgggtaagcactgataacatttgtatatatttaaacagaaaaaaaatagttagaagaataatttttaaaaacacacaccagatgttggtaaaggcaaagatatttttgctcttgactttgtctatgaaagtcaagtgaatactttgaaagaattgatgatggataaggcaagtacattgatttctcaaggtgtgaattgttatcttcaaactttgtgcttccataattgttttttctttaataatgagacatctagaccataactggctatgtgattctgaatctacctttacaacttaatctttgtgattcccctatataagatatctagagtagtcaaattcatacggacagaaagccaaatggtgcttgtcaggggctgggagaagaggagaataggaagttactattaatgagtacagggttgtcgatttggaaggatgaaaaagttctggagatggatggagataatcgttgtgcaacagggggaatatacattacaccactgatcagtatacttagaaagggttaaaatgtcaattttacgtgatgtgtattttaccataataaaaaatacttaatatttacctatgcttagagagagttgacatatagtcatttgataaataaaatttgtaaatgcgtatgcttagataaacatagaaaattgttttaaagtagaacttatagatttctagctttaaaactgtggagaaacaatcttcctatgccatttttttctttaaaaagtcactcaaaccaataattagtacaaaaaacagaaaggtacatttcatctttgaggaaactgggagatgtctgtgactctaagccacaatacataaagatagaagtaggaagagaaaaggtcaatgacttaaccaaatcagagaacaatactaaagtgaagcaaactgagctgccccagtcgcccaaaacatactttggaagatggaagagttctaaatatagcaggtgtatgaacatgtatattatatacacttctccataagccctcactctttttcagtgtagtcaacatattttgcatccctctccatggaagacagagactttgggatactaagcaaagagtaggagaaggatggctgtatgtttaactttatttaggacaattaaatgaatgtctgcaatgtgtcagtaagaccttcagcgtccttctcctacccacaccagaatgctaggaagcatatttatatccttctctagaaaaatagagataccccagaggaaaaaatctcttacaaatagtaacatttggaagaggcaaaaaaaatccccactgggcacttgatgatactgcagtaaaactcccagtacacaagcctcacccatgcacttagaacttactgtcacctttctagggtctcattcttgtgtatgaattgggatcaggaatcaatgctggagtttgaggatattacactcattgctctttgtttacattatttacatgtatttctttaataaaatttaaatatttaattcaaaataatgttaaatttgcagagattcatttaagtttagaataaagaagaacaagaaatgtgaaagagggacaagaggagaggcagaatgcaaaggaaatacagcagcacttagaaaattttaaattagatagtttttcttctgaaatccagtattgaattagtgcaaaattctgaaagtcaattacaaaattcattttatgtcaacattactgactccatgcacaaatgtttattctagttttaaaaactagtattctgtaccttttaatagccaatgtaatttgttgacaaatattgaaatttatacgttaccagaggtctcacgtattgttaccttttaaaatgatcatttattaaccagtattgcctaatgaggcaatcaaaatgtcatctgttgcataggtaacaggaaactaccattactcatgttgtgagatggtcaaagaccttatcatattttatggctaacaaactcatgatgttgtcatatatgccctcatcacagtgtttatgatacctaaaagttagtgcctaaaaattagaaacaaggacagtgaagttagattgtttaatcctgcatatcttaaagatctaacattttctagctgttaaatatgtttatcattatactagtaatgtacgtgcaccatttttattatattaattcattgccactgtacaactaaagaggatggatgaattttaaaaacttccaaaaacttggtagcattttttaatctctttctcttcctcttttctttctgtcttccacacacacacacacacacaaacacacacatacacatacatacatgcacacatacacatcatgaagagcaagctttggaatgaaatatacctgggtccaaaaattttgaacaaattgttgactttctttatgtatgaaattattattatcacatctactttggagggatgttgtgatgtataattaagaaagtatagtctacttagcatgtaggtaattaataattagtagttattattattatcctaacctgacagtttatgaaagaggtaggaaatctgaagataggaaagccttcaaaatataatactccggacttctcctttgggaattaagaaatgtagctccaagcaaggttcatgccagtaggaaagtccttgaatccaactgtattcctagtaagtgtaataaaataaaagaaacctctagaaattgcctcaaaattcccctccagataaggaaaataacacaatatttctcaataatgaggaactgctacaggagttcagtgtcttattctcattaacgttagagtacaatagagaatagcaggaaactgtaaaaactgcagtcccctggtctttttttctaaaaagttagtttgacatatctggagtactgaatttcagcatatttgagaggcctgaatatttagttgatatataatatggctctaagaaatatgctcatgatagattggaaagtatagaatatctattgtaatctgaaaataggaatttagagaacagaagatttgatagtaggcagagtatttgaaaatagtaatacttgagaaaacctgagttgtatagtaaaattactccgtaacacctcattcagttggcttcatttaatgtttaatgtttaatccatggataaatgtcataagtctcacaagtcacgctcaccattggatgataagagaaagggagatcacattttaggtgcgcacaatctacctgtatgcaattgacgctttccatgtaagtgttgccaagttgtatcggggcaccattagtggtatgagacagactttaggagttattttggactcctttttttctattaatatatcttatattttgggggcaaattataccagtatattaaatctatttacagaataaatataaagttaccttttatattcagtttaagtttttttaaaaagtgagtcaattaagaaaaatatcaaatcatggtatagatggaatgctaatatggaaagaattatgaaggtggtgttatgactgaagtttcagaaacatcaaatgacatagtcatttgattcaacaaaacatctacagatggatgacccaatggatgtatacatctatggtacagtctattgaaatgtggtaacaaccagaaagtaaaaggtccatacattatacaattcagtacaacagggaaatactgagaaataatcgcagcttctggatcaaaagcatgggccacatggttcctaaatccagtctccccatattcaggcctcctcatcagcctgcatgccatcatatgcttgcatgctaacaggaatttcgagggaaatgccatatcttttccatttggggaagcttttcagagggaaaactacaggatgcttagataacaaaacattctttcagaaatgttcatgtgagaaatggtcttacaagtggataaaactctgtaacatcaaatacatactttttttttattctgtcactaccttaaatattaggagtagaagcaaaacttaaatttaaatctcaatggtcttacaacatagcgcatctttctttctctgtaatggcaaccttgatgtaccaatccaaaaactttgagtattctggttagttccatacattgtcagattccccacttaagtttgtttttgccaggggagagggacgatttcttagtcattatggtactattatacagtctttagtagatgcccaataagtgtgttaggttttcagagaaagattcttggaagatgtagaatgttgggcaagtaagcaaggaacagcacatggggctgcactaaacttgtgtgtgtgtgacagagaagggagtagcatcaggctaaataagctcattgtaacatggatctgggggacggtagaacacaggctaattatttctggagagttgaaaactcaacagtcagacattacattctctgatcattgtcatttgctttctgaaatggcaactggaagctatttggtagaccttacatggagggaacagtgtttcaaataaatagtagttgcctaattttacttggtttgcttttgttctttcttttcccacatttaaattccaataagaaaaaaattaaacctcttcctctaaatcccctctcccctaaaaataattagtctcacaaaacttttaagtttccaaaaaaatacatgattaattaacctgctttaaaatgccagcaatatactagacatgggacagtgctaagaaagtgtgaatgtcccctggcagtcataaggaaactgaaaagcttaaggggataactatgtggaaagcaatttattggcatttaccgtaagaggcctgagagtcattgaaagaagactaagtcacaaatgcaccttgaagtgtgaccaggggagcagatgaagggtttgttgtaagaagcagccagagcctctggcggatgccgtactacattttccaagttgtttgggtgggtcacaactgcactccaacatcctgtctgcaaatgctaaataaacaccaagttcacgtcagactagagaaccaacgtactagctaatgccatttaagcaatcagaatgcttacattattttcacttggtaattcacatccaaaataattgaagttggcacacccagaggagtatatatcctctgtgtagatgttcagagagataggcaggctggtcaactgttccttctgttgggagcaattggaatcagcttagattatatctactgtaatagaaaatattttatatttaggaggtgggaaaggttttggccttcgaaataataagagatattgacaagatataaagcttcattccttactgaagagctgttaaggattagcaaacccaagtctttgtgtgtagagatgaatgaaatttgcattttttttaaaaaaaaataaggtttagaaaacattgtgcaagggaacagccttaatacgtgcagccacttgtccaggaataatacattcaatttttcagtttaaaattccagtatgttctgatccaagggtgcctgttacactctgctgaatttttaagaggtaatttacatctctacaaccaactccaaagcatgacatttcattacatccgctcaaaatgaacagctgctaagtcatcaagttctctcaactttgcttctaaagagaaaagtttagttttagtgcttcagtgaaatacttttttgaaagaatgacttttataaaattcatttgtttattatggtaaataaacaacttaatggcaaggggtgtgttccttgtaaaggtgatcacggaatgttacccagaataacacagacatctcatttcccagagaaggaaatggttttataagttttgtgaggtctcttgtctgcttggccggtttacagtgctggtctctggagctgatccgcccctttgctttgtaagtctcagcaattgacgaggctaggctgggcgctgggcttttctttttttttttttttttttttcctttctcactgccctgcggtgttttgaactgccttcttacagacgtcatacagcccttgaggaatagtttctgcctggtgagattgaatgatagttctcattcacaaaaccctggattctaagcagggacacacagaaattactttcgcaggtaaatcagcccacccagccaaagtgtggagagatttgttccttggctgacttctttgctccacggagaggagtgttttcctgtgcttgccctgaaatggaacttccttgacagctctcccgtgttacagtacctcccggtcattttctttttctctctctctacctgcgctcttcgagtgtcagaaacctttaaagctgttactatggaattgcaaaaaagagatcaagtgactctttcactatgctggtttcccttgtgacccagatgaagaatcaattcagaattcagttcctcccttggcattgcaagacacagaagaaactgtcacttcctaacagcctagtactggagtaaattcagtatgaaggaagaaagcgctcctgcgtgttagaaccttgcccatgagctggaccgaggacaggagatggactccaggaaaattggatttcttcaagcagcctcccttggaaatggaatatctttaaaatcttctttgcagaaagacagttagaatgtattaatcagaatagttgaagacttattttcctttttattttttttcaaaatgagcattattatgaagccaagatcccgatctacaagttccctaaggactgcagaggcagtttggtaacgttcttttctctcatgcttttccccttttctcttttaagattgacgtactccttgagtatttagtaagttgtgtgatgtcgaggctttgtgaaagaaggcagtattggcggctcttttattctttattttgttcccaaactcatgtgctttaaccaaatgggtgctgattttttttttaattcctcttggactgtaacaatttatctgatgataatttttaaaggaggaaagaaacttgcagatatgttgggagttttgaaaatgaaaacttgtcatttttcagtgtttgattcagttgcttgttttcttatcttctttgcttgctgcaagcaggctggtggttgacaggctttgcccttgtctttaaaagcaataccctcacttttagcacagatgtgttagaaattaataatgttatttatatttaatcatacacatgaaacaaacttgaatttaactatgtggctaaatgtatatcaagttgcttatcattcattcatctcttatgttttattttattagaaatgattcctagtaattatatttttggttattttaatgcttttactctgatgaaaaaatatgtcagtttcaatgtattctaatgttctattatttccccaatggtgatttgatatgctaatcagcatatggcatggcccttaaggagtattttccaacaaagtaacttttttttctacaataggtatttacaaaatacttttatggctattttaggggttagtcttattttgtttttcttagtgattgattataaataactaagctcacctctttgaaatggaaataatcatacctcacactggggaaataaaagcaatgattgaagtgaggtggttgagaatgggaggaaaacaggccagcaaaatatgcattatcatgtgagcaggcaaacacacatgtaaatactcaaattatttgcgtcaggaatttagcttgtgtttttgtggataggttagcctttgctgttattgtagtgttttacagtcaaccagaaacaagaattgccccatccgcagtatttctgtgagttttaataaattatagatgaagattttgtctcttaacgttacttgccatttcttacaaaataacacgtgcaataaattattccttgagtttatttaaagaaaagattgcatctgcaaacaaatttggagagtcctgtcctttttttcctcaaacaataaatactggaaaatccttaaaatccttgtatgaattaccatagctaatataaatcaccaacatgagtaaacagaatttataatatacatgaatttaactcatttataatttataccattcctatgtgaaaagatgttactactttaaaaatagtgtttaaccaaactatttctctttttgtctaaactgccaggagatgtattttcaaattcaggtttcaattggaaataatttgttcatttcaggagatgagtaacattgacaccctttacctctctgagattatcatagtctatttttatccacaattattatattttttgttttaaattgtatgggatattttcataagtcaagccacaatttaaaatgcatttttaaatattttgatttgttaatgtgtgtatttttccatttaactaaaaatattctccatagacttggggatagaatgatttctgtgtaagaaataaatctctctctatatatgcatgattcttagatttaactacacactatagaaacctctccagttattaatcttacatctgacttaataatataaccgcttgggtatatcactgcagctgccaaaaaatttggcctgagggtataatcagctgtagtaacagttttgccattttattatccgtctatcagtcaaatattagacacatctattatatttatttatttaattacatgtataaaatcaatatagattatagatttggtatatagagaaaatatatgtttgtgtgtatatatatgtatacacatacatacacacacacatgtttacttgagcattaaaaaaacccaaacggcctctcttcttgtgcctctgcacataaaggccacaggcctcaaattgctcagagggacaatgttttctcaccagtgttgctgtctgcatttctccaccaccaccctaccctcattccttttcagttgacttcccatgagagagacctaaaactttgccatttatctctttttcagatgtttatttgtttccaggttgatctccaaaatactttgttcttgggacacatctttctggctttaccatcttcactctgattacataaatctattttgtgttccattggtctactttctccaaatctgtctactgtcctccgggattccctaaagccaaacattacgtttggaagtttgttgtattgtgcaagaatccaatgttttggattacttctttacctttttctatttgtttctctccaagtatcataaaaagcagtccacactaacttgtccttacagccttaattaaattgctatgagatattcacattttaaatgggatttcatggcaaacttgtattttatacccttcctcttattaaaggtcagcctgttataattaaaattttattaatttcaagacaaaatacaaataaccttaaaattaatctatttgtctctttgtaacataggtgtccaaatttagggtttatttaataaaggtgtatactaggttgcttttatttaaggaacagttatttatatgccacgttctagcagaaagtgattatagtatttattcttaagcattattttaaaaaaatgtgcctgcatgaaattgagaaaaactttatatattttcttatgctcataaagctaataaaattagcagattcattgattgcagaattgtttgcctttcttgcatatcttaaattcagatttagtcagttgttatatactatgaaaatattaccttacatattccttgatatctctttaacacttttataaacatttataaacatttcccagggatacttctcattaatgtaattaagacttgtgatttagtttaagtaagtaaaacattattagtcttacaaatataaatataaagagaagtttagtcaatggaagtggacttttttctttcctgctgacagaacagtgtttaggatttatgtgttacatgtaagatcattcattatgtaatctgaaaataaaagagatgctactgttcaaaatatgactgtggttgtttttaaagcaaattttaaaattggttattgtatatgtaatagtacttatacttttcattataagtattattatgtaataagtatacatgtaatacttaggtttgtagatgcagaaaaaattctggaagactctgtccaagcttttggtagtggttattttttaggagtaaaaaaaaaaatggtaggagtgaaggtaagggggactgcctctcttttcttcactgtatttgcatattgtatgtagtttttatcaataaagtattatatatgaaagtttaaaatattaaaaatatacctactatatgtattagcaagctcatctttatatatgccaatatctacttagacattaaaccacaatttgctcaggttatataatatgcaaatgagtatttcagtactggttggatacaattttctgaattttcttgcaactctgaccaatggaggattataatttttttattagctcttttctcttaaggttgtaaaaatctagactggcttagcattcttattttggcctcatgatcacagtggaaagcattcatataagctaaaatgtccaattttataattgagaatcaaaaagatggaataacattaatatgttggaaggaaaataacccattaaccccattattccatcctcagttattctcattttcaacttaccttacatatcttaaatagctgtaaatactatttctgtactctgcttcttcatttaacatatcaatatttttctatttttggccaggcggcgtagcttgctcctgtaatacctgcaatttaggaggctgaggcaggcagatcgcctgaggccaggagttcaagaccagcctggccaaaatggcgcaaccctgtctctactaaaaatccaaaaattagccagagtggtggaacatgcctgtaatctcagcttcttgggaggctgaggcatgagaattgcttcaacccaggaggtggaggttacagtgagccaagatcgtgccactgcactccagcctgggtgacagagcaagactctgtctcaatttaaaaaaaaaaaaaatccatttttctaatacttatagctttcattttattgagtgtcttatgaaagagctctatcaagaattttacatatatattatttagttcttattacaatattgaaaagaaggagttgttaatcctaattttacaggtgagaaaatgattccgtgagatgaaataacttgagcaaggtcataggctggggtaacccaagtctgtctacctcaaagaacgtgctctggttcttcagcttgttgccttcctctactgtggatataattatctttttaatggccataaaagtgttcatgttgtgaatatttctagatgcattacagtatttggcagttttcttttcggaagtatggtagcctatgaaattcagggttgacgttgttggttgttgaaaaatagctttgtgaaagactgttggttgttgaaaaatagctttgtgaaaggctcttgcagcttgtagaccattatattctctactggtagcaaataaggtcctctggtctttataacagacaataaagaacaaaaggccaatgcctcacaattttgaatagattatctttccaattctattaccaagtttttctgttctctgcaagctctgtaaggcttcaggttggaaacaagtagtacatatcagattttgtatgacatctaagatcagctttgaaaaaaatatgcaatcttccttcctatttcttctatcttagaaacttgtaaatacgcaaacaaatggaattctcatattttctgcctgtgcaatatatattatgatttggtttaggtatgtgactactgtcaaagttggttcagggttttgagcatgaggtaaactttttttggtcctattacccaagttagtgatgtatctgttatgaaatatacttaaagatatacagcttttagaaatgattaagataccttgaaatatttgatgtatttaaaacataactagaaagacacagagtggatcacagataggtttactctttaaagtcatgaagtatgagattccctggaaaaagccatttgtccactgtacttctaacatgctctgtgtccctggaggagtcacctagtccctctgaagccaagtctactgtcctgtaaaataaaaggggcaaggcaggtcaatggattttaaacacgtttatttcaatgggacattttttattaatgaaatgtgagttgaagttaatataaatgaatatttatactgtaatttttagatataaaatcatatataaattcaatatatagatataatttttaaaaacatagatatgtgtgaaatatataagtaaaaagtataagcacacataaaacaataaaacagccactgagtttgtacatttaccccccaccccaaattcaaaccctctccttaaaatacctctaaagactttaggattccaaggaatattgtttgaaaaccactaagctaatgactgttaagatcacttacagttttactctctgcagtgctgccttaccgcgggagagtcatttgtgtattctgtatctctatatggattgggataaactcgtaggtaatgtagcagttcaaatacctctgccttataagaccttgaagttatgtaacttttcccacttctgagatatcacagaagagttatcactataatagttaagatctattcattttatttagcatcttattttttacaagtttattttaggctcatctggaatgagaaaatcatgcactaaacactgtatgatgcatagctgataattcaggaagtgagtatggttgttggtaaagaaatgctgaattggtatgaaattcttcagaagcaagacgcttcttttggtatttcaaaatggggttctccaccctctttttctatcatgtcaactggctgtggttatgtgtgcaataatacttagtcctgactgcaactcttttttttttcttccccacggatctgaggcacaccatggttttggccttatcattaaaacttgccttttaggagaggtaaaggaatagctcacttagtagttcctctgtcaatcattccaatcatgtagtgaattctattgaatcagaagggatgatgacatgaaggtaaccatgagtatacgaatggttagtcatggatccacccaaccattactagcaagattgagaaaagtagattctaagatgaaactgaaggggaagaatattaatgaggcctttaaggagtttttaagctttttagggaaagatgctgagcgatatgtataaatattcccaataatactaatactaaacatatagaattgtcaaagtttagataaaggtatagagaatagggcctgagggatattagctaggttggtaaggaagatagtcacaaagaaagcacagtcttaataaaaaatcaatatagattttcttggaagcctttccagaggtgatccaatatctcaaaatataatacaggggttgaaggtatattagaaaatggacagaagtaaggtatacttcagccacaagcaccaaatctctccagggattggtgcctatgggaagggctggggtaccacatggggcacaatgacagcaagcctgggtgagacactgttaaatataactgtgtacaggtaactaactaatgagagcccgtgccagtgatatgtctcagctctcaaattgcctagttctttgtcaagtttgacctaaattagaaagcatttcaaaagtatggaaagtaggaagaatgccagaacctatggatgcagttttttagcatgacaggggcaatattgtaagtatttattatctgtcctaagccttctaaggggattggctccctaatgagcatcctgggtgatggctgaggatgcgaattagagaagctaacagaagggtgaactgctcttcagaataagagttagaaaaacacaagggaatatttcaagagaagagctggggaagtgtggcaagaaaaaagagattatacagagaccaatatggaagaattccagcccagtttgaactaagcatccaccatctagcaccctaccctgtttaataacactggcaacctctgggcaaaagctgccattaatgaaactcagtgtagaggacatttgccccccatctcagccctaagaatttctgccatagggtaaagggggtcacctgcaagcccttccatttccctactacacatgaggaagaataagaaattagaaaactagaaactaggtgtagaatgtatgcacaccaaggattgcatcttccaaagtacccttataggaagcagtcctgttgttttaaacccacagagttaggaagttttctttatatctaatacaaatcttctttgcttaaattctaacccatttcctcttagttgtcagtagatataatgagagtgaatcaatagataaaccaattcttctttatggcctttgaaaactgctagtgagtgacttcttggtcttttttcatttcatattgcaaaatattcattctaaattgtaaaatagatggcaccagtgtgacttgttaaaataaatgtttcattaaacataatttcagtatgtaattgttttcagacttcctagagaaaagtgctcccgttgtatctaattctctttcttgtttaaaatacatcaaagatgagaaattgagctctttttagtgaacttgcttgagacattcatatggaatacagaaaataataattcctaacattcaggatgtcattccattgcaatgtggcacagagttttttctttgcatcaaggaatttatatgactgatactattttagtcaggataaattactgtaaaatgtgtccacttttaaccaatggcattctaacatgggataggcaacagcgggctgtgatttttgctctgatactgcaactttgttatagaatagcaagtaactgattggcagctagatcaccagctagctggagaaagcagcttctaggtctatagtcatagttggagtcataacctcattaatgatagctacaatgtattgggcatctactctttgacagacaatgaacttagtactatatacagttgaagcaactgtatgaataaactgtatgaataaaacttgaagtcgcacagcttataaaattacagtgctgcagaaaaatcttggtctgtcgaaactacatcccatatttgttgttgttgttcttattgttttgtttgcttttcctcactatctaaactgctttggctacacatagttctgtttcatggtattagaaaagtagtcaacaagctgctacttatacttttccttcctgtcctagactgttcaagtttcttcttttaatcttatgtatatcaagaacatgtttgcctatggtatttgtctgcctttccccccaagatttgtatacaagcctccaaccgtgagccctagagatatattgagaaatagaacatggactttgacacggctccattccttggagatctagctagttcctgactcgttcagcttattgactctcttcctctggtcagactataaattgcagttttccttctctctggcatttgaccagttagtagcaccataaaacctttgaaataaaagagaccacagagaataacctataatctgattttccccacccctaaccccaatgtggagctggaaacattttgctagtctttaacatttccagtcaagtagggtcaagaaaaactgttaaaaacaatgtcaatgcttaagtggtaaaaagatttgttgaagaatatatatatatatatatatttagagacagggtctcactgtgtttcccaggctgaggtacagtggctatttacaggtgtgatcatatgcactacagccttgaactcctagtctcaatcctcctgccttagccttcccagtaactgggactacaggcatacaccaccatgcctggctggagaaatatttttttaacttcaaaaatgaagtttgagctgaaaaagagagctaaaaattagtctgtcaggcaaatgtgtgaaagcagttctattataatttgtattgagctataatgtaattcctaaacttatgtcatatagctaagtaagtagctgtaattcgcatcttgaaattttaaatttacttctttcctctcaatatagtcttcatctgaattaaaaattgtggcaatttgtatttattgtgtacttaactatgtgccaggcactgtgctgttcacttgacctaattatctcattagatcctcatgatgaatcctagacagtactcattagtcttattcctcagactgaggcctaatgaagtaaagtggcttgcctaaatttgagtggcaaataagataatttcatgattcgcatattttcttaattataaaatgttacctttagcaatgatgtatatgttaatatgttcaatgagttgatctacctgaagtgcttagcacatggctggctccttgtgagtgaccaggaactgttagcttatattatgcatttttgaagtttacacattggtatgactttctaaataatcaagaactctaaatgtgaaagctgattcattttgtaagggtttcttttccataaggtagtcttttttaacacagtcagaattaagcatttatatagagctaggtattccagataaatcacgttaatagtgtgattcaaagaagacacactgctatctaggtgggtcaaagaagtaaactacttagtggaggtggcaaaataagaagtggtcagtgggaagctaaaccacctctgatttagttatttaaaactcaatgagaaccctctaaggaagcacaactaggcaggggtttcatctgaaaggaatggtcagctacctgagcattatctctaggtgcacctttgtaaagactttctccatgtatctttcctactgggtgccaccctgtggcttggtcctacggtaatcacactgccaggcattctctacctctacaaatcccttactcttctagtcctaaggtgcattcctggttgtgtaattcacagattattatctccctggagctgagcctcatcatctctatcagaccagactgagaaggactcctttttcctttgtcccgccatcccagctcagtgcagaaggcttaagatgctttctccatcatttctaaagaacaacagacaaaaatagagatctggttaggtctgttcttgtggcgtgaagtgttaggatgagctgaacagccacaggggctagaaatgtcaagaatgcaatacgttagagcaggcatttagcattcctgtctctgatatctactattttattatgagtagttaccaaaacaaaacaaaacaaactgtaaaagcattattttgttataattaacaactgcacattggattaagtgtgattgagggtggagttcaccagcttgggaaaaaaaattaaccattaaagattccctgagtgttttgctttaaaaagagatagcccaattacttttctgtgtttcgttaagagtctactagtatatgaatcagtaagagcttctagggtaatataaaacacacacaaaaaagcaaatttgatgttagcagacaactttttaaaggtattcgtgtaactgaaaaaatcattttacgtacataggaatgaaattttatgtttacctagaaatatatgtgaaatccctccattattgcaagatctttttcatgtaaatatcaaaagaattagacagtctgcattgtttaaaaccaagatagctagtctttttaatctatgggcaacttgtaattacgaatagcagtagctgcctggaataatgtactgagagctgcgttggtctcagagaaaatgtgctgtgatccattggtgatctctgccagacagaagagggacatagtgtggctgcttgccatttaaatggccttgatgatctcatcataactctatatatctaatctcaccattaaatttgcatgcaaataaagtcattgtagcagaaacaggttttatgcatacatacaaatacatgtgtattttttgatatgttttgtctatttgtcacctatgaagaacatataaatattgtaaacagaaaaactctttttggatgttgcaaatgcaaagaagaaaaataagtaattctaattttcaaaggtcacccctgtaatcaccacccagattaaaaatagtaccagcagccaaaagtcacctttatgcccctttaagcccctgcccccacctactaaaaataatagtgatcctgattttgaaaatcacaaactttttaaatttcctgcttttgaattttatataaaaggaataatatagcatgtactcttttgtgtttggctgtttccctcacccccttgcaaaattatgtttgaaagatgatcccttgttgatgcggatatggttcattcattctcacttaagtataggtaattaagcaaacttttgtttgagatacaaattcagggtaaaaatcagattttctatttaaataataatttggtatatatgactatttgagcattttaaactgttgtcattttacaataattattttagtatgatttaatatccaaattctgttgcttagattcaccctcagtggacatttcttctgaagggccttcctagacttccccaattagaattaaaactctcttctctgtgctgtcatgaaaccttgtacatttctctaactcttgaaggattacaattattgtcttctgtctcacgtacctctcctgtgagcatgttttggagtagactgggtttgctcatctttgtagagcaatgaacccctgttcccagcaccatgcctgctccatcatgggcattcaacatctgtcctttgcatggaaagtagaacagtgagttcttccatattacaaagaatattacagtcaatttttatttttaattttcttttagtagatggcacttttcaggagattgtactgggtgagttgtagacacagtagttactctttatggcaagagttgtatagtatccgggaggatttttgcctcttccctgtggctttctttcacccttagtttgccaccaccactggcaattctaatctaggcacaccttccattgcctcctgtgtttcccattctaaaatatatacttccaagttttcctctatattttctgactgctcgaatgactcttctcgtgtcataaactagtaaagagtagtgcatatagaaatgctgataaatgtgttgcacatggttatcacccgactgacatgctgaccttctgactctatcaatgggtgatttttatatgaagccaagaaatctgttggtggtaagtactaagaccaccacttcaggctcactctaacctcattgtgtgcatcttgaaaccccacacagttgtcacatatgagcagattccacaggagggatgctgaaccaaagtgacaagcttgtcctggagccctaacacagggattgacccccgaccttcaaagtcagggaacaacttagggttggcttaccttcttgtattgtgaacttttccgattgtgaagccagcttttagctttaccacactcccagacttaaatatttggaatggcaagaaattaggcttaaaaaaaaagaaggaaattaaggcttaatccttaataatgaggaagtaatttgttttagtattgtacagaaacattttctagctacctgatcatttagtctagttctatagcttaaaatatatagtccttaaagaaaagttttatttctgtgggtctattagttacaaaagtaaaggtgcattttttattgctttatttaagtgtttattaagcttgttctgccacaggtaccctgctggctgttagagagacaatggtgaaatatacagcactcggcttcataaaatttatggtctagtgactttctgaagtatttctatagggcaggagacttctatttcaccttctactatatccttggaatagtttttactttcctggtaggagtgtgcatttatataagtgtttcagttgcttccagaaatccagtggtaaacaacataattttaaaacctccctacttgaatttggggtggagtaatataaaataaatctggaatatttgattttttagaccaaaatactttccctgggttagagagatattttcttttcttactggcctggaaatccatgccattttaataagagatatttttattctaggtaaattgtttacttaatcacctcctaacaaggctgtgtcagccaagttaaatatttaaatttatttttatttaaataaattttaaaaccaacagatttctttctcattttaatgaatttagcctttgagttttcaaagataaaatatacagagtagaacattttaatgtatctgtagagagggaacacaaaaagggcacatcaggaaaaaatagttggaaaaaagtgaattttatacaaaattaactcataaaatgaatataaggcattatttcacttattgccaaaatctgtctttacagataatcttcgggagacctttatttttataggccctagttaaaatattttttgaatgcttgaggctctatttcactaataagagaaataaactttttctttctataaataactgctactagcttgtttgtcagctctctaaataaactcattttactattactatgcttgagtgctgttatatattcctttgttactgtgcataatccctggctataactgcattaataagtaaggccattacatcaaatagggatctaacaaaaactttcgaatggactatcaaagaccagattcaatgcaggaaatcagaaggaaatggcatttatgtcctagtgtagttcagttaaaaggcctgcccttaaggattacaactgccataaaagggcaccatgcaagaatggaaaacctgtttacaacaaaatatcaaattattatctgactttcacaatgaaccacattattctatgactgccagtcatacatctggactactataccatttgtgtgcagttacagcagctccagttctatatggctagttttgaacttagtctgactttaaaacccatcccatttactatcctctgctttttttttttttttggtgtatattgtgggaaattccataaatgatttttataaactttagccagtaatcgggaaaaactgtaagattttgtttgtaagctttataaacgttacttataagattttaattgaattctaaattaatttctaatttgaacctctcccttctcttagctttatatgcttggtcatccctccttaagtaattagcttttttgaagctttgttttttttggtttttcactgtttctgttatattgacgatttgactttcttataaattgttagtaatttcctgaataaagtacagaagtttatctttcaaatttcccatggatcatttcttaatagtcaaacaattgtctaaatttccaatacacaaagaaaagttttagctaacttacttcaataagatggataatttgttcaaagtgccaaacacatttgctttcgtaattcatgccatttgtgtgttaagtgtataaaagagatagagaaagaatataggaaatgtaactacacatgcaatcttgggctttccaaaatgtttaaagtaccaaattcccttggtgccaattgctttaggcatttcatcttcactcagttgcatcctaaatatagcgtaggtgtgacataccctgtaaatttcaaattcacataaagaagtcccagccttcgaggcaagtcttaattgaatactaaataaaaaccttagtgtcttctgaaatgtttctgaataaatagttgctttacagtctttgatttctatgttcgttagtgtccaaattcagaatgggaaccaacttggggagaaaaagaaaaaaagactctcaggacaatctttttaaaggagtaacagataatctattttggctaagacagggtagattcaggtagtcagataatagaaaggggagtcccttgtgtatcaactgatgctggaatttgtgaaatcctataaagttttgtagaaaaaaatgttaaattcatggaaacttgtttggtcataatcctcacagtttctaatttagtataacatcctgaataaattcattcagaccgacggagagaagaaattattatttgcaatatgtgaatttctgactaataggagtaatagaaaataattggtcccttaggatatttctgattatatatgagaggcttggggagggactctgtgtaaccgttgcttttaacccttgtttttgatgggtaaatagaacattaatgctacatgaaagatacttactctggcatcctcaagagaaagtaggttcttttttttctcagttatccaagaaacttttaacaattctaaagaaagaaataaaaagcacttagttttcagaagcatgtttcagcttcttgcatcaggagtaggccagatggccatgttctgtatggctttataaatattcctttttgttccatgtaaaagttaatggctagttttaaaccttggtatcatttcgaagtcagaccttatgtgcttaacttcattcaaagtatttctattttgttaggctgtaggaaaacatagagctgagctattaaaattccagggcagtttggaattgccaacaatatgtactggagagatgggggtggattctgaagtcaaatgaatttggaactcatcttcttttacatgctgggtgattttggacaagggggaaaagctacccatagggtttctgtgaatgttaagtgaaataatacatggaaagtgcttgaagtaatggtagggacacagcaaaccaaaaaaaatgctagccagtttattattagaagggaaaaactcctattaatattttcttgtttatgtttgtgttttcatgttagtcttaaaacaagttactgtttgagaatgtgagaattttaaccatttacaaaatggtgtatgatatgacatgtatatgatctctcacaagtgaaatgataatggaaagtttactgaaaatgtcttaacagttctaggtaaaacttaatttttccttaatttgaaaattaataaaagtatgaattagatttaatctaaatttattattctgttaaagtcacatgaatgtggaaaaaaatcagtatcacttctaactaaatctggccttgaaacttctttgacatagtcttcttaaaatatatatatcttatattctaaattgtatattatttagaaatatgctatttctaaactgaaatgtctgatatttctaactgatatatatatctatatatgatatgatatatgattatatatatgttatctatatgatatataatatatgatatatatttctaactgatataacaatgtatctcagttcttagagatatgtaaattatattttaatagtagcctacaaagatgatacaagaagataagaaataaatatacttttatatataaaatagttcaacagcaagattcttatttagaataattttctacagttttatttagggtagtttctatacagaaaaaatacatattttatctcctttctgtgctaggctctggagatgcaatggtgcctccctcccttcctggagcttaccaagcaaaacaaattcactaaataaaattattcctaattgtgttttaagtccagtgaagagaacacaggagggaccgagttaaacagtgtgtttgtgtatgtctgtgtatgggtgtgtgtctgtgtctgtgtgtctctttgtggctgtgtgtcctagagatgtactttagttggagtggtcagggaagttgagaactgaaagaaccagtcaaacaaacattggggagaaggggattatagcaggtacaaaggtcttgaatatccagcagatatgaggagcagaaaggctatctttttcaatcacttaaaaaggaaaagaagtgaaagattgctgtcttaagaacttaaatttatatggcactcatgtatagatttccagtgaaaagttggacaacgtgaaatgatgggtttcctacctacaagtctccagtgtttgtctttgactggggtgttttctgtacatatctgacctgatttctgttgctagcctgtcttcccaggggccttggtgagccgaggtcagagagagtggacttcacctaggaaaaaaggaaaggcttctgacataaaagtgcccttgaaaatgttctgctgctgtaaatcccttctctttacacaaagtttaagaccctcccaagagtttgacttgctaaactacaagagcatttttattaggtgtaagatctcactttgactttaagtagcaagtgacacaccaggcaaccctcgctgaattctctcttgccataagtgcatagatttcagtgttctaatgcctctctgagctaaatttgcctctgatctgagttctaaatgtaattggatagtagatatatgtgagtaaaaaaaaattctaccaaatggttggaatagttttcccaaagaatgtaatattggccttcagctggtaataggatgtgcctgctggatgaatgacatggttgatgcaaaagacagatgtaagccgtggttccccaaactgcagtagggatgagcatgacagccacacatatcaaaggccaggtactgatattcttactggaaagactgctcaggatgtatgtggtgttctttttcctggccacccttaaggagtttatgaatgggttccatcagcttcaaacagcaaacacagtttggcctgtatgaactgaaacccatcacacatcattgccacgatcattttcctcatgtatgcaagttctcaagtatatttttggtcacaaaacagcaaaatcatgacaaaagcaacaataacaaccaaaagtaactaaatacgatttttatttagtatgaaatgtattgcattgtaattatttcaacatcataacatttattaaagatgtatgtatcactttattattctatgctcatcccccctctttatacaaaatggagcataatctgcacattcattgttctgcagtttgtattttgcacttgacagtatgttgatacaaagagaagctacttgtgttgctctggaagaactttattgagatataactcgtatgccatacttttcatctatagaggttatataatgtattgatttttagtatatttacgtagttgttagttaatatctaccattctttgaccataatgaataacagggttttctctgcacagatatgtccatttaagtaaagatgccaatgcagctaaatagaatcactcaaaaacaactccaaaatgagccagggagagtggagggaaggaaaaggaggaatgcatccaaacatagccctacgttccatgaacactcagtaacatcatcaaaacgtgatgcaattaaattttaccaggtttactgctgtcctgatgctttccaattttttttgacaacagttttgcctttttcaaattcaaatggtataattggggcttggtagttgatgtttatcttaattgaaacagattctcttcatccttttgctctgagactcccactttgaggctgaaaggtcattttaaatctgcagagcactcgagaagccacataatgaattcaaacaaattcatgcctattaaaaggaggcttctctttctcaacttccagagcttacatagaataaaccatttggtttttgtctgactttcttttaaaaggaagttattgtgcttcctttttaatgctctaactacagagaatggggaaatcctgttttcatttattcttatcagaaagaaagtgtattttgctcagtaattgcaataaaatactactggggttacagctactatacttgtcaacaaatttaagggatattctttagctgcattactttaaggatttcttgtctatcttttatctagcaacttcattttttaacatttactctatgtacttgtgtaaaggtgcaaaaaatatatgtacaaaaatgttctgctggagtttttgtaacagaacactggagaaagcctaaatgtcaatcggtatatggctgattgaacaactgatgcacaactataagacaatactgtgcatctatgaggaagacctctctagtatgacactatctccagatgacatttactattgtattatttttatactttgaaaagaagatatgcacactcccatgtatccattttcactagttttctttgtatatactcttagagtttatgtaagtgcaatgaaaacataaattctattctcttcctccctttttaaacaaaaagaagtataatctgcacattcattgttctgcagtttgtattttgcacttgacagtgtgtcaatacatagagaagcttcttgtgttgttctggaagacctttgttgagatataactcacataccctactcttcatcaatacagggtgtataatttcgtgatttttagtatattcacacacttttgcaaccgtcaccaaaatcaatgtagaacattttactaccactataagaaaccccttaccttatagttatcaccctccatctcccccattacctgctccatatcacctgcctcccttccaccccacagctctaggcaacggctaatctacgtttttttcctctataatttgcctactctgaatgtttcatataaatggaattatataatatgaggtcttttgtgacttgcttctttcacttagcataatgttttcaagtctcattcatgttgtagcatatatcagatttcattttttaggaccgaataatattccattatatgaatataccacattttgcttatttattcatcagttgatagacacttgcgttgtttcactttttggctattttgaaatgtgctgcaatgaacatttatgcaaaagattttgtgtgtgcatatattttcctttcttctgggtatattcctagtagtggaattgctgggacaaatggtagctctaagtttaaccttttggttattttccagtgtatctgcattctcatgtttcttacagcagaaagttattctcttgaatggctgcatcattattgatgtagtcaaggtgtatttttaagtggaaaagttaaggcacaatgttcccagttatggaaaaatatgctaagactgtacatacataaatatgtttcactcaaaagcatctttctgcgtatgcacttaaggtgatggtagaagttgctagctttgaggaagaggtggctacacgtttggaatctgaggtagaagggggctgagtactcaccattttaaacttggggaaattttactatgtgtgctaattaatttttcaattgaaaatttgattcattaatgtaaagaagaagaaatgtaaaaaataaaaaagaagaagaagaagaaatgtattttcctggactcctctgaccaatgttggtcaggccaggggcttcttgacctgtgctttgtttgagtcatccggcaccatgaggtgcttagtgctgtacaagcactcttcttgccatctgctctgcttgacatcatttttagttattaggacaaaaaattaatgactgcttttctatctttaagccaagacaccatttaaaaaacagacatttagctcttactctaaattagtgtttcttaaatgttttattcaaatcaatccacatcaaaagcaaaataggagggaaaactagggtagacatctgagtgaaccttgggattgagaaataggagggtggtatgtgaactaatcattaatggtattagcaaatagagctgggcagtctgtctgaagtgcttcccagttttttgtacattcttctccaagtatcatgtgttggtgactggaagagggagtctttactttccgcacagtttccatcatgtagctctggaagggctttgtgtttgttctcatctttgcttgagaatcagctgtcttattttgggcttttctattttttaagacaaaacctacctatagtggttatacatgaaacacaccagtagatttgatttctgcctttggttaaattagtttgccttattaaatgataggaaagaatcaaaattcgtttgccttatagatttgttcattcttatattcactcatgtattcattaagcatttatttattcaacactcctatgacatcactcctcactgagtgatgattccttctagggtgccatagagggcttgatttccagctggaggaagaataatttaatatcctttttaatgatcaaaattctaaccaaacccaattttgaaaaataacttgactttgcctaaaagtacattaagaaagatatagaaaagagattctatgaaaatgaaatttaataatgtaaaataatttggttttatcagaaattcataaacagactttacttagagttaaaagtccctttgagaggagtaaaatcattaatgaaaaaaatgcatacattttcttcaatcatcatctatatcccatcgtgataatgaggagtacgctgtgtgtagtgactgtgtttgcaggtggagggagtttgagtaatggaagtaataaagatgctcccagaacaagtaccgcatccaattagcttgccaattaacaatctattcctgaagtatttgtttatgaagatgattttaactagagagaagtcatattttattttgtttatatataaagatatgttaatcataaaatgtattcctttcaaacagttatacatttttcctttggcagcactattgtttattttaaaggaaaagacagtaactaatcacagcatttttaaagaaacaaatagagattatgctgctgtaaagccagcataaagccatttttccaaatgtcaacagagttaacaaagaattttatgttgtaaaaacctcacagttgcctagtttactccctcatcaaaaaaagagggggcaagattctttgacatttttatgtataatgtgactagagaatgtgacttcagtgatgatgatgatctaattgcaatgctaagaaccatggctgggctacgactgtgtgtgcacgttgttatgctggggagcaagggtacctaggaaagaaagcaataatgaaagtatcacttgggtatttgtttatttctggatcttattctatctgctccatattatcactttggcatttaaaatctagatgatggctgggtgggtgcagtagctcacacctataatcctaacactctgggaggccgaggtgggaggatcacttgagtccaggaatgtaagaccagcctgggcaacataggaagaccctgtctctacaaaaaaatatttttaaaaattctccaggcgtggttgcacacacctgtagtcccacctactcgagaggctgaggtgggaggattgcttgagactgggaggtcaaggctgcagtgagctgtgattgtgccactacactccagcctgggtgacagcaagaccccatctcggggaaaaaaaaaacccagatgatatggttaaccatattcagtcattattcagttattagaaaataagatttacaaggcatccatggaggggaaaacaattacacacctggttagttgggctgaggcttgcagagataaaatcacctgcacactgttgcagagccagtgctccaacctagacttccggacaccaaagcctatggccattaagcactctgctggactgtatcttggatagtttgctttatggggaacgtagtacaactttacaatacaactttaaaaataaagtatagcagagtagcagtttgtccacagtcaaatatgaaatatgtaaacatttcacaggttctttttttaatttttattttaggtttgggggtacatgtgaaggtttgttatatgggtagactcatgtcacaggggttggttgtacatattatttcatcacccgggtattaagcccaaagcctaatagttatcttttctgctcctctccttcttcccaccctccctgatcaagtagaccccaatgtctgttgtttccttctttgtgtgcctgagttctcatcatttagctcccacttataagtgagaacatgcagtatttggttttctgtttctgtgttaatttgctaaggataatagcctccaggtctatccatgttaaaagacatgatctcattcttttttatggctgcatggtattccttggtgtaaatttacctcattctctttgtctaatctgtgactgatgggtatctaggttgattccatgtcgttactattgttaatagtgctggaatgaacattcgtttgcctgtatctttatggtagaatgatttatattcctctgggaatatgcccagtaataggattgcatggtcaaacggtagttctgctcttagctctttgaggaattgccacactgctttccacaatggttgaactaatttacactcccaccaaaagtttgtaagtgttcccttttctctacaaccttgctagcatctgttattttttgtctttttaataatagccattatgactggtatgagatggtatcttgtggttttgatttgcatttctctaataatcagtgttattaagggttttttcatatgcttgttggccgcatgtatgtcttcttttgaaaagtgtctgttcatgtcttttgcccaccttttaatggggttgtttgttttcctcttctaaatttgtttaagttccttatagatgcaggatatttgacctttgccagatatatagtttgcaaatattttctcccattctgtaggttgtctgtttaactctgttgatagtttctttggctgtgcagaagcttttaagtttatttagatcccacttgtcaatttttgcttttattgtgattgcttttggtgtctttgtcatgaatctttgcctgctgctatgttcaggatgggattgcctaggtcatcttccagggtttctatagttttgggttttatatttaagtctttaatccatcttgaatttttttgtgtgtatggtgaaaggaaggggtccagcttcaatcttctgcatatgggtagccagttatcccagcaccatttattgaatagggagtgttttctccattgcttttctttagctttgtcgaagatcagatggtcctaggtgtgcagttttatttctgagctctctattctgatccattggtctatctggctgttcttgtaccagtaccatgctgttatggttactgtatccttgtattatagtttgaagttgggcaaggtgatgcctccagctttgttattttttattagaattgccttggctattcgggctctttttggttccatatgaattttaaaaagttttttctagttctgtatttcacagcttctaactacattctattgttggacatctttatattttatccaaataggaaaacattaatttaaaattcttgtcatataatctacaaaatatttatattcaaggcacaatgacccttacatattctttttttcttttctttctttctttttttttttttcgaggcaggatcttgctctgttacccaagctggagtgcagtagctcaatcacagctcattgcagctttgacctcccatgcttaagcgatactcccacctcaacctcatgagtagctgcaacaacaggcgtgccccaccactcctggcttgttttttttaattttttttgtttttttttttgtagagacagtgtctccctatgttgcccaagctggattcaaacaatctgcctgcctcagcctcccaaagtgcttggattacaggtatgaaccaccatgcccagcccttaaaatagtttttattataaaggcaatttatgtgcattctaggtttctttaaaaacctagcaagaggccaggcatggtggaatgccagaaatcccagcactttgggaggccaaagtgagaggactgcttgaagcctagaaatagagaccagcctggcaacaaagcaaggccctgtctctacaaaaaataaaaaataaaaattatttttttatggtgtgtccctgtagtaccagctctcaagaggctgaggtgggaggattgtgttcagggtgcagtgagccatgattgcaccactgcactccaccctgggtgatggaacaagactcttaaacatacacacacacatatacacacacacacaatacgacacacgtatagaaaaaataaaaatacaaatataaatttctcataacctcaacacactcccaaataatcactgctaattcttagttattttcttctattctttttccaagcaagtatgatactaatagcaattacctggattgtacagttttaatttctttttttaatttagcattttatcatgagcatttttccatatcacttaacattatttcaaacattacttatatggatacaaaatgtttcaccctaaaaagattttgtaacttatgtatttgccaattattggatattcaggctgtttctagcttttcccaattattaaaattatcagcaaggaacatctttgaactgaaacattggcttatctctgaatatttccttagtaaaataactatgtcaaagaatatgactattttaagactattaatatatgttgcaaaaaatacttctctaaaggttataccaggttacactccaagccacactgcttgagagttctcatcttactgtgctgctgcaggaaatgtttttcattaaaaaaaatctttatccacatattaggttaaagtggtatttcagtgttgttttacttaacacttttggactactggtgtgaataaaaatggttttaatatttttattagccatttatcttctgttaattttctgtttgtctcttcgcttattttctattggggttgcatagttttttactttttgcaagagttctttatgtattagatagatgaaccttctccagctcacatttattgtaattatatattccaatttttagtcccctttttacttttgttcatggtgttttatacagtcaaatttattgattttttttcttttgtaacttctttctttgctttaataatttgagggcttttatcttaagagtagataaatgtttagctacattttccgtatttgtgattttttaacctagctcttaatctgtttggaatttatcttaatataaggtagggatacaagtttattttttcccactatacgtctcaggaccatttgttacatgtgccctactttgcttattgctttgtgtcacagataaaattttatgtatcatctatcatgtgtagacacctcagatataaattacattttacaaataacatctcaatagaaacaagtagaaaaaaaagaactctggtgcaacccattgagagaaacatactacattacaactataacaatgatgtaactaaatttctatttgccttctaaacctttttattgcttgtagccatttgctaactcctgaagaaacttttaccttttcttgtcccagggagttgattatttaattacagtagcataagacaaaatgataaggattggaatccgcaatgagccctttcactgggatgaagcagaggctgatgggactgggtggtaggtgggtaaggtggcagatagatgcaagagcaggaaccactcaccaggcactaggaaaagctccatctagccaggcatattggcaatagtgtgccctgactagtctttgggggcaaaacataacagtctcctaaaaagtggctcagaacaggtaattcctagacatatgcccaggcgtgaacaggacaacttattgaggtatggaaataaaatcttatattttttcttatccgctcacaaattttctttttcttgtattttgtaaaatagataatattttgacataatagtgcaagaacataacttattgaaaataaatatacgtaatggaggtgcttgcacttttttttttttttttttttttttttttactaatagatacggtatccaataaaattggtaatcacttgtctggatcatgtgacttcaggaagctctatacaccagcttgcagttcatggatgggacaggaagagagtatcttaagcctatgttggaaggccaggtggactggagtctcagggacggaagataagcacagggaattaaagcagaagccagtagtaatcagagataagacgtatgttcaagttaactgcagcaggatggtgtggtgctgggctcctgaatctgtttctgcctaaagtcatatctgtaaagatcaaggaggaggagccagagcagcaggtgaggttcaagtgattaataacactggaaaggagaacaggttgcagaaactatggctcaggctacctattcagccattttcattttttgtaatgcaagtgcctattacataatcaagggtatccttagtaacatatgaagcctacattctatttccatttttaaaaagttcaccagtaaacaattgtacagcaaattttatcaatgtaaaaagccattgtactctatccagtcaaaccatattcacctctcctaaagtgcccattacggaggctctgggaaattgaagttgcccttaatcttgagttacaatgggcagggcctctttttttctctaaattttactcaataaatgcaggcttcctatgcattaaatggtgcccacaaacattgaaactactagctcacctcctgaaattcagcactttactatgtgtctttcaatgtaagagcattcactaatttaacaagcattacataacatgtgtcattaatgagttcagttagctaggccatggaatagatattcctgtaaatcaactcctttacagttactaactgacttagtttcatggcagaggcatttatttcaattagactgtggttcctgttgagataaaatgagatcaactatgtgacatgattttgaaaaccatattatattggtgcatgaatgtatatgtgtgtgggtgtaggtagtttacagacagaatgtgtaacataggcatgtggcttgtaactgaaacttttacaaaacctagttcattctcattctataaaagtgtgtacacacatgtgcatatacacacacacactgtgataatgtatctgtgtatttgagggttataaatatttagttgtagagttctgacaaagtagtaaaatagtctcacttcatctggataaagatcaccatctggaactataaaaattgcaatgattccaaattgttgaatagttggattgcatatttacttttcagtagtatgttggcatgcatgtagatccagccttcctttcaacaaagaacagtggtggaagattcccttaaatggttactctttcctcaataagagcaaccatataaaaattatagaactattagtcatcatagttgaaagtatcgcataagattaacagagtccccatctggtgatatgtttttacatcagatttattaagatcagagcgggttttaactagagcaatgacactgctattattaaataagagacggaaggcctaatacataattgtctatttctttctagacatttatgtgtttttattaggataatgaatacagaattatcaacatcatgatcatagtttttttggtttttaagtagtatctgtaatggcaagctcatttttattttataacctacccacacacagacctacagtgaagcaaaacagatgctgaaatatgtttgttgccattggctttgaagaaacctcagagaggtttgcctcagtattttaaaagcaaaatggttggtacctttctgaatagatgtcattgtgtccttcaaacaaagctgacactgtagaaaagaaatggattgccttgtctttttaccagtgaacatcttcacctgaacaaaactcatcaggaaaaataaaggattttcgaagtgtagttgttgtttaagcagatactagttattccatccttacaaatattttatatataatatatacatttatatataatatttatatgtatatttcatcacacaccaacatccacagacacacacacacacttgtttgactacttcctctattccttgaaacgcttttgagagacctgaaatatccttgtatggcaagaggggaatggaatcaagctgatttttccatttttacaatgtgcctgggattgtgctttgcagtttagtggcattttctgattcaacctcacagagccctgcatggtataatattgtctacatttaagatgagaaaagcaagatgtggagaggctaggaaatcttcccaaaggcacgaagctcctggcagaaccaggatttgaggccaagtatcaaggttacagtacagatagacatacatacactcaattataagtaaagtttttatgaggctgggtttgacagcaacatgataagtagaagtttttgatttggtaagatttttcgaaaactcagagagtttattgccaaatttatttttctcctagaaacatttttgttgttgttgttgctggcatggacagttataaaaataaattagaagtaaacagataacagtttcctggctgccttcatgtctgtgagcctaacacggctcccagaaggaaaaaatatgcctcaaggaggcttatatgatattgcttatttagggaacctttgaccacttatttacaatatccagttacagctgtgctactttcctttttgggcaaaagcacatattcgcttgaccattattttggaggaagctgatattgcctgtcacttccaacatgtccttgtgtaccctagctcataattgcagcatttaagcttggagctcccctaacaacacaattattgccaaatttaccatcgttgggaacattggtgaggcctgcttcagaggcctctttgtcagcaagaagcatgttgcagatatgcttcaccttgcatcataaatgcatttctaaaagtagtttcctattgaattattttgtaataacatgtttttctaactacaaaataaacacatgttcattgtggacaaattgggaacttcagaaaattcccaataaatattccaatatttattaatattttataaaatacacataacctgtcattgcagcttccagggatagccatcattaaaacgtgttggtttatttcctgaataaacctttaaagcatatacacacataccccacaaacatgctcacacacacacatatatatatatatatacatttttatggtcatatatatcctattatgtgccagatgaaatcaggtcggtctctctatacacacacacacacacacacacacacacacacacacacacacagacacacacacatacatacatatatctatacatatatatgtatatatgtaatatgtacatactatgtatgtgtatatatgtgtatatatgtatatatatatgtgtatacatagtgtgtgtacactgtatacatatatgtgtgtatatagagcagagagacctacctgaatattcatctggcacataataggatatatatgaccattaaaatgtatgtatatgtatatmtatatagtgatgtgtgtatacatatattatttccaaattttgaaaatttttatttattattttttgagatgaagtcgccctatcgcccaggctggagtgcagtggcacaatcttggctcactgaaacctacgtctcctgggttcaagtgattcttgtacctcagcctcctgagtagctgggattttagttttgccccaccacacccaactaatttttgaatttttagtggagacagggtgtcaccatgttgcccagggtggtcttgaactcctgaagtgctgggattacaagcatgagccaacatgcccagcctgtatatatatataattttttattctgcattcttcgcttgacatttttaagaagtattttctcgtgtcatttaggattctagaaaaatctgatattctaatggtgacataggaatccattttacatgtaataaaatgatttattcaatatttagccattctttcattgttgggcattttaaattttcctcttttttctttattgtagtggttcactaagcatctttgtagaagaaatgttaatctgtatctctggttaattactttggcaaaatttttggaaatgctattactgggtcaaagagtttaaatggtgtctaaacttgtcaagacatactaaatatacttccagatagtttttacaacaaattttaagcctacatataaaaaaacagttccggtggctcacgcctgtaattccagcacttttgggaggctgaggcaggcagatcacctgtaggtcaggagttcgagaccagcctggccaatatggagaaaccccatctctactaaaaatacaaaaatcagctgggcatggcggtgggcacctgtaatcccagctactcaggagactgaggcaggagaatcacttgaacctgggaagcagaggttgcagtgagccaagatcactccactgcactcctagcctgggcaacaagagagaaactccgtctcaaaaaaaaaaaaaaaaaaaaaaaaaaaaggttattttaagaaattgtatagtgaattctcttttttaaaaaagggaaaacatttatatattttattaatatttaaacctgcagttttataaaattttgtctagtccgacactcttgttttacaaatgggaaattgaggccccagttccatatgagagacaaatacaaaaatctgccttctaaagctggtcaaaagcagttatatctctatgatcaattcagaagttgagtcctctgttgaaatgatttcaatagttgaggtgattttactgtttctctttaatgttgtgatatattttctctcttatacgactctatagtaaaaacgagaatcattttactcaatctggttcatgtagcagtatcaggctgtgaaattcatactgctcagacactggttctccaactgtgatgtacgtaagaaatactgtgcctgctgtctcttaaatgtagagtcctgatcttcatccctaagaccctgattcatttgctttagataacactgagagctaatcatttttagcaagcatcccaggtaattctaaggccatattgtgagaaaagccagtataacgatggagaattcttatgttgatgctctgacactggctctacatctgtccataatttatttaactcctctctgcctcagtttccttatctataaaggaggaaaggaaatgccagtctcttccacctgggattcttgtgagattaaatgaaataagccatgcaaatgatttaacacagtctacagcacacagtaaatactcaataaatgtgaactcattatcgttactgttgtcattggtattcatattgatatcattattcctgcattggaaaatgtaaatgtacaattttaagtgattagcattgctggtggattattgattgcaatttgtcctgctgtctcttctgacattgctaaatttcatttacttaaatatttcccttatttttctcttgttcccacccatgcaccccagtggagttgaaattgagttgagatcaaatgcagcaggtgttgctcagagaatttggtaagactagttgaaaaaagatcagtgaaactttatcaaaaatagaatagtgattctcctggtcacctgcttagagaacccattaagaagtgtgaggttctccaggccaccatagagctataatctgcaccttgtatcagccatagcaggtatttgcacagtaaatttcccctcacctagtttattcataggtctgatcatagcacactacagactcaaactcctgggctcaagtgatcctccaatgtcagcttcttgagtagctgggactacatgtgtgggccaccatgcctgaccatggagttcttaaaaatggatattgacatacatatatagaaaattcattcaataaatagttatcactttcctatacctggtgtgagaattatgctagatattggaaatacagaaatgaatatattaatattaaagtcacttaactaagcttttccctgtgataatctttctgaaacaaagcaaaatgatacagaattctttaagtactattcaatttgtggctatttcctcctaaagatcagtgtatctgaacttgctggctgctagatattttagtcatttcaaaatgtactgatttggctaaagaatctactttgaccaaaataggataccttaaaatacaacatcagcaaaatatgtgtaaaatccccagagaaaagccctcttaaatgcctacttatttcaagtcaaatttagttaaactacataacttagtcccctgagtgtcagtggaatttctcccagagctgtgacttcgtcaagtaaagttaccctctctcttgacctttggaaagagatggcatttgttgatagttttgtgtgtgtccttaagctgggcgcttaacaaatattctctctaacaaatattctctcattaaaacctgaaacagccttttcttacacctagaactttgtaaagaatatgtcaggaataggacaatcaccttttaaggctcagacagccaagaagctgttttctttttcagtcaagtgtagagagcatccatgactgccaagttctcagccatggctggtacaggcgggtgcagtaggaggcacagttgccactcctcagaaagaacagggacatggctggacccattgtcctacttggctcagggccaggcagggtagcagacctagttgttgaatgcccttttattgatagttatttaacttcaataggatcttgtttttatggtaggcagatggtccttaattggtttgaactttgtcctcttttcatagcagaaattcttaatctgctgcccacaaataagctttggagatctgtaactcccttaaaataacaaaaatgtacaaagcatttagtaagtgtcatacagtgtgctgagcacttcacatgctttatctcctttaaatctcataaagactcatcacataggtactgttttcattcccatttttaaaatgaaatttaaagagactaaatgacttgaagaaggtcacaaaactaaatagcagtagggtcattattttaggccaggttatctaactccaaagcccttagcttaatcactaggctatactgaactttatggaattacatccaaaagggatgtgtgtgtgtgtgtgtgtgtgtgtgtgtttgtgaatttttccgaagactcacatttccaaagatttataagtcatgtcgttctcaaaggggtctctggtctccaaaatttgaaactctttgcaacagggtggctatgttttagaatgacataaacagatacaatgttctccagagtccagagcagggtctaaacctattgggatactatacttgtgttatcaactgaaccacttggttagttcactaggaagatctgcaggtcttgagctgagcttagtgttttacagacatgtgccattcattcatcacctacaccactcatcaaatatctgaagaactatgaaggctgaaggaaaataagtgggtgagcacaggtgcaaataaataataaatttggagcattctatttcgtgttatttcttgctaaaactggcatattaccccaaacatcaattgcaatatgctattcaacaagagtttttaactagtttataataggaaaattgctcttttttaaaaaccagggttaaagtcacatcctttctctcctctgacaaagtcactgtcacataaaataatggtcctagagtcaaaataataacagaactttgttctgatggagactgtaaatataccaatactcccattaaaaatataggtgggctgcctgaactgagaaggttgtgtcatggctgttagttttaataactggaaggcttgacagagataattgcgttagtgcttcactggcctcaagatgcatgcaatgagtaaaattaagaccatcttattaaaataccaaagcattgtataggaaactcccatgtattcaaaggggaaagaagaaaaaggaatttcatatttacggagcatgtactattttcaaaactctgttctaggtgctttcacattcattaactcattttaatatgtgagtgctttgtaatcctttttgagtgttgcaggctcagagagggtaagaagctttgcttaaggtcccctagctggcaagtaacagaacctattcaaattcagatctgatttcaaagtgcatgtagtttttgccacagtacgatgcttggggagctaaatggcatttgggaacctagagttaaagcatcagtattttttactaaggggccattggatcctagagaggcaacgaattataatggataaaaatacaaatttcaggcaagttacttctcttagcaccattgctttatccggcatagtaataaaaatcaaatgagacaatggatatgaaatgctaaaaatagtacattctctgttgttattatctattgtgattattgtgttacccttggaaaaaggcctgtagaatagtggcagctgggtcccctggacagtgaactaccaacctaaaaactgtctgggcaggcttgcctttgggagttcttgtatatcagctctaattctgtccaggaattcagaggcagagagcagggttgaggagaatttcacaggtggtaagatctccggtgaggaggcatttcagcaacgtgatcagtgttgccaaagctatgaaagatgttgaagaacacactttctacctgagatatcaactaaagtttgaagcttcaggagaaggcatagttctatcaacagacagcagtacagcaccaatagttaaaccctatatggtagatttaaatgctgagccttcaaaatcatttgcctgttttactttagctccagcaaagggatagagaaacccttcttctgtcatccctctcccatgtttgctgttgcttaagcagtatttattttggtaacaagaatacctggccttgccacttaatctccaccattccaaagaaaacctttctgagatcatcttaacgttgtctctaggcaataaatatctctggtttctagttattcccaaggacactgacctcacatttcttactgtcttaaagtcaaaagtacctttgtccttaactcacaccaatatgtatgagactaggatatgagagagattgttacatcttgcttgatgttttgacattataggtagtgtaggttttgttattacagtttgacttttgaaatgcgtatgagatttctcaggtgaaatagagcctttgatgtggtactcaaaagggataactatgactcagaggaaccatttctaaaagatggcactctttctccttccagttctttctgttcaatagtagggctggggaaaggcagaggcagtttttgttatttcaaatgacagcatcaaagatagtaatccacggtgctcaacaaaagtcgaatgaccttttttccttctccattcataaatacataagagctgatgcttcattatgtttaaatacaaaatgcacactcctactttgttttcctatatgtgagttctcatgtattcttcaaatgctcatctaattactgttacctactattccaaatgcaaatgacaaggtcccagtttactgttgatcctatattacaagagtcatcaattttggttgagaaacacaaaggacaaatatctcattattgtgctaaccatgcctattattagttttgtgcccccataacataagtaatagccccaaatacatggcacttatcacacaccaggcataattctaaatggcatgttctccatgttatggaagaagagactgaggcatggagagagtgagtaacttggccaaactcacaaggctacaaaggcagagaatcaggttttgaactcagggctgcctagaccctgtgttcttaactatcatcatatagtgtctctcttactgtttctcactgaagatgagagaggattaaaatctcaggaataaatgtaacctccacaggtaggcttatgcataaaattcagatgcaatgaataacaaaatgactgcctcccacaaaattaagaagcaaacatataatgaggacttactctgtgcacacactggtgaggacacgttacacatttcatatcactgagttcacacacacacacacacacacacacacacacacacacacctatatgagggcagtatgatttccccatgtgataaagaaggaaagggaagctcagacagattagatatattgtctgacattgttcagatagcaagaagcagattcaagatgcaagcatagaccagagaccattatttgagaccatgaggccttttctcaccagttattcattcacttaatattaatcacttaatatgcatttgctgagcacctgtcgatgtcttgtaaatcagtgcaggaaaatcataagatttgaaatcacagcatctaggttcatatctcagcttcatcattaaccagcaaaccagtaaacctccctgtttgcagtttcattatcaataaaatgggttgacaaaaaatttatttaacagaaatgttatgaaatgcaaataaaataatggatgtaaagaaattggcaaatggtcaagcaaaacatgaatgttaattttatgatgattaaagtaaatggtatggagacccccaacctcaaatagctgggaaggggtagttgataaggggagaaatgtgtttaaagccagttgctttattattttaaccctgagataatgctttattgacagtgtgaataagatgtttggaattgtggaaggaagaactggaggtcatattacacatttcttactacatgttgagctttgaaaagtgagaatgatttcatgaggcagaaattggttgggtctaaaacttcattatctgtaacacatactccagagagtgagaacagtatgaccagaagtatctttggaggggctagagacaagatttgaagggaattaggacaagattttaaagtaacctaagtgccgtgataaagaatccacttttataggcaaaagtagttattcaaggaagtaaaataattacattttctagccactgcaagctatctctttttccttccttttcttccttcattccttcttcctttcttcctgcctttctttccttccttccttctctccctctctccttttttcccttctttctccatcccgtttaaccacacacaaaatcccaacagcagcgtagaaagtggtgttgaagagctgggcatgtgggcagggacaccaccaaggaaggtggtgtaatatagcctggtgacgacagctttggctcttctcaccactcccgctcccgagtaagcacagcatagaggaatatgagctgagttcagtgctgtccagttggaattgggaatgttaaagctagaaggtcagcaagtccggtgttctcaacctgacaacacatcaaatagctatgacagccttttgaaaatagagattcctggatccagcttcagctttaccgactcagagtatccaaaaggaggcctaagaatctgtatttttaaaagcctctccaaagtgatatgtagcagtaattgaaaaggacaatctctttacttcattgatgaaatagctaagtcccagagaagtcaagaggcttgccaaaatcacaacgaggtagtagcggggtcagaactcaaactcaaggctcccaattctcaacccagtagtattgcccagcatcagttcttatctttgcgttataaatacattcctgcccatcaacagtggattgcaaaagcagggaggaagagagggtggcaagggtcaaaaaatagctatcaggtcctatgttctctacttgggtgacaagataattagaagcccaaacctcagcttcctgcaatatagccatgtaacaaaactgtgcatggacccctggatctaaaatttaaaaatcaataaataatacaaaagaaatacattcatatttttctgaaatattcttcagaatatcaagtgggaatccctttgttttgcaaagctggtctgatatgtttaagtaaatttaaccagatagttgttttctgtatctccctctaagtattaacaaacatttaccatacactataaagcattacaatattgttaggatgattaacaagagtaccaaaatgaaggactcttgctaaaatccttttccagctttttcattctactatttacagacatgtaagcacatccattcatttcagcaaaatgtaacattccacacaaaggttttgaacattgtgctcggctagagaatatttctagtgagtgctcataagagacattaaaataagcatttgtctttcattcaagctttatgaaggattaaaagtaatccaattgttcaatccttcatttaaatctttagtccaaagaacagaagatttgggattgagtcgtaatccagccatttaaatctatgagactctaggcacatcattgccctccttcctgagcctcagatttttcttcagcaaataaggataaaaatctacactcccaatcccatcacttattgcccagggtcactgtgtgaattccactgaacaatgcctgtgaaggtgctcagaaacaacctgcttgtgagggcataagaagcacaggaggaaaaggcctttgggaataattcttttgtctcacccaggacaggttatctgaccatcaggggcacagatggaactctttttggacatggcaagtgggtaaagcacccaaggtgccctgagagatttttttcatgtggtctgaagggccacatactttcgtgggattagtggcatatgtggtatggaaactcataattacattgcaaatttaaaggacagctctgtaggaagaagccaagagcagaataagcatagatgtggtttggattttatttttcctcttgtcaaatttaacttaagttctgaattctataaaaaaagaaaaagagtggtgaaacagtcatattttaagatttttaaaagtcttaaagacatggaaaaagcaaagacgatacctacactgcttatttaaaaaaaaactcgatttgagtttcatgaagtactggcatttgctcactctgtaattctcaaagactattttcaaaatttggtcaaattaaatttcaaaggtcagcaaagtatataatcatgtttgggttcttttttcccccaagtttaaaaaactgacatctatcctttttttaggctatctgaatgtatgaaaaaagagtagaagttattttacagcatatatttttctgtaaaagtaactacatttaacattaaattatttaccagtggtattcattttatataagcaggctggagatggaggttctatttacatatttccactgtcatggtacagtatagtactaagtattttacaggccagcaatcaaaagaattacaattgctactaggaaacactaaatctgaggattctgtcatgactatgtatagctggttagaaaaatctttgctgaattgaatggctttctcattacagatggccttgtttacactgtacttagagttctgtgtgccattttggactcctcattaaaaaagcataagtcattttttaaaagaggataagtgggaaataaaatgggagccaagattatatcgaataaattctacaaaaaaagaaaaaagaaagacaaaatacacataattgaatatcataatctatctagaaaatagatgaagtggcacaaaaatggatgaatatattcaaatgtttgagaaatattacttcataaaaatgagagaaattttaatggctggagaagtaaaacttgattttttatttgagaacatagttaatgtcaaaacaaagaaagtcagcaatgaacattgcttctcaacttgaggtgattagagaagaggtcaaatgcctttagaaaacagctgtgcatttatcttggctgtggacctggcaagtcaacaggatttatgaatagcctcaccatgaatttggtcatcctgaggggaaggaaaaccccaaattaattttggagcagaagatcagtgtaactactaccatccttacgtcttctcaatgagcttcattattcctcccagagtggctagagtaggtagttgatgagcatttgtggaatggataggtatctcttttctatgacctactctatcaccctcaggatctattaatcctttgagtttgatctctaaggtggcaatgaaatatttcttacaccagaaatacactgaaactcagagaaagagggctcaaatttgaggagagtgctatactggcaagaggatgccccaggtaatatcctttccttcttctagagaggaacatttggctctagaaaggcatttagcctatgagttcagaacaggaatggtcttaggcatctgattcaacctacgacattgccagtctgaaccaactcatcctgatcccactgcaaatgagctaggcaacagtgaagagtggttctagtctgggtttggataaattgtgaaatatttctagaatttttctatagactctgaaccatttccccagaagtgtgcacattcaaaatgtcattttgcttcagaataacattttgaataaggcaagcctaatttttgttttttaacagaattttaaaataattaattcacaatatttgtacataggataatgggatattttgttacataaataggatgtataatgaccgagacaaattatttagggtatccagcaccttgggcatttatcatttctatgtagtggaataatttcaatttctttcttctggctattttgaaatatatgatacattattcttaactataatctccctattctgctatcacacattgtaacttatttcttctatccagctgtatgtttgcatacgttagccaacctctcttcattcccctcctcctggtagctatcattctattaccttcatgatatcaactttttttagcacccacttatgagtgagaacatgccatatttgtgtttctatgcctggcttatttcacttaacattcaggtcaattcatgttgctgcaaatggcaggattttgctctttttatgactgcatagtattccattgtatgtgtatgtgtgtgtgtatatatatatatatatgtattttctctatcggtttgtttgttggtggatactttggttgattccatatcttagctattgtagatagtactgcaataaacataggggttcaggtatccctttgatatacagatttcctttcctttcctttagataaacacccagtagggggattgctggattgtataatagttctacttttagttttctgggaaatctctatgctgttttccataatggccatattaatttatattcccaccaactaagaattcccttttctccacttcctcaccagcatctattttttttttttttggtcttttaataatagccattctaaggtaagatacctcactgtggttttgatttatagttccctgatgattagtaatgttgagtactttttacatacctgttggtcattttacatcttcttttgagaaatgtcttcatgtcctttgtccactttttgatgggattatttgggtttggtttggttttgtttttgctgttaacttgagttcttggcatattctggatattagtccgttgtcagatatatattttgcaaatattttctcccatttaacatgttgtcttttcactctgttgattattttctttgctatgtagagatttttggttttaatatagtcccatttgcctgtttttgtttttgttgcaatgctttgacgtcttaagggaagcctatttcgatctggtacttctgaaatctcattggctcaagtgaagcacgggtgtaaatcctgagtgtttgttaatctcggttctgtgtgtcttctgtaatccagagacaaattcatgtgtcaggttcacacttgagctgatcctctgtaactttgctgattgttgttaagacagaacagaaccagactggctttcactttacacaacaatcacaactgtgtgtaatgattatagacttattctctaacatctcttaagcacttaggtaatgagaaatgtcataatgaaaatatctgttaaccgaggaagatcaagggaacaaaacaaaaaacctaaatgaagtgtgaaggtggtagaagtaaagacatagatggtttcacttgggccagagatagattgaatgtgagacatttgaaagtctaatgtactttcagtacgtactttccagtttactttgatggaacgcactgtgttgaatgttattgtgctgacaaataagcccccaaattaaatgacttaaaaaataaactcattcttcatcaagtagcgttctaggatggtgtttaggaggatgtggcagctctccttgctctcagtcacggaccaggattctcccaccttctgtttctaccatccttcacgcatcagcatctttagcatccagctggcagaaaaagaacatcaagataggcatgtgggaggagctatgagccagtcctgaaagtggcatgcaatatttctgctcacatctagtcacttggccaaatctaattgcaagggaacgagaacttcttttatgcccaggaacaggcagagaatggaatatggcagacaacaagcagaatttcctatactcacagtcctgattattgacttctatgctttcccaaggtcattttgtcttcagccagattccatttcaaggaaacatgaaaatgtttcttcactctataaaatcattgttgaagtagatcctgctacctctgtggtagcccatccaacatcttaaaacttttaaaagataatttgtaaccatacataattcacccaatataagaaatcatgagagaaagctaatctcagtgtacttattatacaatgagacacataatgagacatatctttttttattctccactatatattttaaaagaattgaagaggcaagtgattgtttatggccatcgtaagataatattcttatcattgctttgcccagtaagattgaaaaaattgtctgtaattcaggccacacaaccctctgaagcccttcgccattcattcaagccccattaaggcagaaaacccatctgtttggattgttgaggttggaaactgaataatatcacttctccaaaatagatttaatagtagggctggtgaatggtttcctgacctgtttgatgcagagtgcaaacccagaggaaaaacatggtatatgagttttcgtatccattagtctaaaagaatcagaattcggttatattttaaaggcaattatagtagaactattacttttttgttttctgttataatcttacctagacttatttaacatacttaacacataatattttaaggctaagtatttctacaaaggatttatcattcaatcattcttatttagtcaataaaatcttttggagattaatttttagtaagcctaaatacccaaatagccaggaatgtgattgaggatcacatttttaaaacccatccctcaaaaagaaaattgtaatatcttgagagacaggtatggtttgaagatcacccctcttcaaagtgagttcaatatctgacctaatggaatcactccccattccccaggactaggtgacactcactgatctgggaaaaataaacacgtgcaactaacaagagaaattttgagaattatgagtaagctttgaaaatttgggtactgaaaatagagagggagggagagagggaggtgatagggagggagggaaagaataaaaaggaatgaagaaaaaactaataacaatttatctcttaagaaaatagaaggtgcagctgggtacggtggctcacgcctataatcccagcactttgggaggccgaggcaggcggatcgcctgaggtcgggagttcgagaccagcctgaccaacatggagaaaccccaaatacaaaattagccaggcatggtggcgcctgcctgtaatcccagctactcgggggcctgaggcaggagaatcacttgaacgcgggaggcggaggttgcagtgagccgagatcgcaccattgcactccagcctgcacaacaagagcaaaactccatctcagaaaacacataattaattaagtaatgatataaggtgctaaatttttattttcacccatccagtttcttttcttattctttcctgatatgtaattacctcagatgcagatctgaggtgaaactaatgaagatcaagctaagagcttctcactggcctggttccctttcaagttgtaagaagtggtactagcagctgcacgtagttttaggttttgtaaaattcaaaaaactaagatttttttgtattatttttctgaaagcagacccttataattgtataatcttcgtgtaccacaaaaccttgatcccacccctgattgcatggctgactgctgttcaaacagaaggatattcaaaataacccccgttaaaatgccttcttagagatgttccagattatttcttcaaatgtgctaatcaatctcattaacctatttctttaaataagtgaccaactcctagctaaattaaaaaatagttatgaagtttatttaaagtagaactacacagataaccatggtaaatgataaccggtatagaaaaagtaccgctgcgtctaaagatacccatgtattcacgatacaaatatttattgagcaactcgtacgtgtgaggcactgttgtacctgctgggggacacattaacgaacaaagtagatttttaaaaaaaaatctctgcacttgtggagcttatattctaatggggtgagtaagatgataaaataagtaaaaaacaaagttcatcagaagctgttaaatgcgatggagaaaaattaagagtaaggaaggttttttgtttgtttgttcaaaaaaaaaaaaggttaggaggttaggggtgccagttttaaataggccagtatgggaatatctcatgaaggtaacattgagctgatatctctagaaagaatatgccaggcaaagagaactgcaaatccaaaggccctggggagggagtatgcacagtgcttcaaggacagctagggaccaagaggctgagcagagtgaacaagagggagagatgtaggtaaagatgagattagagaggcaccagggaccaggtcactgagggccttaaaccattgggagaacgtagtattttctctgaataaaataggacaccattatgggataatgagtaggaacttgccgagaatgggcttacattttaggaggatcgctctgtctgcaatataaagaataaatgtgggtgggtggctggagaagtagcagggcacatcattaaaatatcaatgtttcaaagtcggcttattaaatcaattttacttgctctatgtcatagaaacaataaataaagacagaaacaccccgcaacactaccttgggtatttttctttgcttgcttgttttttttttttgttgttgttgttaatattttaacttttattttaggtttagggttacatgtgcaggtttgttatataggtaaacttgtgaccccgggggtttggtatacatattattttgtcacccaggtgctaagcatagtacctgacagttagtattttttttctgatcctcttctctcctcccaccctccatcctcaagttggccccagtgtctattgttcctctctttctgtctgtgtgttctcattatttggttaccacttataagtgaaaacatgcagtatttggttttcttttcctgcattagtttgctaaaaataatagcctgtagctccatccatgttcctacaaagaacatgatctcattcctttttatggctgcatagttttccatggtatatatgtaccagatttttctttatccaatctatcattcatggacatttagtttgattccatgtctttgtgattgtgaatagggctgtaattaacacatgcatgcacgtatctttatggtagaatgatttatattccttttggtatataccctgtagtttgattgctgagttgaatggtagttctgtttttagttctttcaggaatcaccacactgctttccacaatggttgaactattaataatttacattctaaccagtagtatataagcgtttccttttctctgcaaccttgccagcatctgttattttttgactttttagtaatagccattctgactggtatgaaatggtatctcactgtggttttgatttgtatttctttaatgattagtgatattgagcattttttcatacacttattggccatatgtatgccttcttttgaaaaatgttcatgtcctttgcccactttttaatggggcggtttggtttttgcttgaatgttcgtttaatttcgttgtagattctgggtattagacttttgtcaggtaatacaatttacaaacattttctcccattctgtaggttatctgtttactctctgttaatagttgtgtttttttttcctgtgcagaagctctttagtttaattaagttccatttgtcaatttttgcttttgttgcaattgcttttggcatttttatcatgaaatctttgccagttcctatgttcaaagtggtatttatttggttatcttccagggtttttatacctttagcttttacatttaggtctttaatccatcttgagccccactttgttaacaagacgctattcctctttggactttagcttgatgaagccacattttgagaaagagtgcattttggaaatatagcatcttagaagtgatcttagaaagtgaaagattggtagtaacctgctgtgagcagtacaaggaaaataaaactgagttattcctgtgggactacagctgactctcaggtccagcctggcctggagagcatgtgcttttctgctcttccctccatactcttagttagtggtcagcacatgataataggatgtaagggaagaaataaatctctacttgttttattctcaatcacagtgacacctgcatgaaattgccagagaaattaaggcctcccaatgactaccaaaaaaaaagacactttccgcttcccattgtcagcacgtattctgattgaatgtatatgtttactacttgaagttctcatgatttctaggtaattactgcaaatatggacctcatactgctactgcaggctttgcctcaagagtccaaataccatggcctcatgttagggccatttgagatcctttttgaaaaagttgctttattgtgctaaaaacaaagacacataatatgagatctaccctcttacattttaagtgtatagtacattattattagctgttagcacaatgttgtacagcatatctctagaatttattcatcttgcatgattaaatgatacacattgaacaacaactctccatttctccctccacccaggcccagcaaccaccatgctacttcctgcttctatgagttcaactactttaaatccctcatataagagggatcatgcaatatttatctttctgtgactgacttatttcacttggcataatgtcctcaaaattcatccatgttgtagcatatgacaggatatccttcttttaaggctaaataatattccattgtatgtatataccacattttttaatccattcgttcattgatggatatttagattgtttccacatcttggtattgtgaatatacataaatgaatatgggaatataaatatctctttgacatgctgatctcaattttttggataaatacccagaagttgaattggtagatcatatggtagttctgtttttaattttttgaggaacttccatactgttttttatagtagtggcatcactttacagtcccaccatcagtacataaggattccaatttctgtatgtccttgccaacaggtttttttttttaataatggccatcctaacaggagtgaagcaatatctcattgtggttttcctttgcatttccttaatgattagtgaggttgagcatcttttcatatccctgtttgccattttttgtcttctttggagaaacgtccatttctttcattgggtttttttaattttgaggggtttcaattgggttttgggggggttttgctattgagttgtaggagctcctatgtattgtagatattaataccatatcagatatatggtttgcaaatgttttctcctaatctgtaggttgtattttcactgtgttttctcccttgctgtgcagaaacattttattttgatgtagtcccacttgcctatttttgctttttttgcttatgctttgatgctgctgtggattaggaaacttaatattgttaaaatgtccacaatgtccaatgtaatctccatcaaaatcccaatggtattttttatagaaatagaaaagcagtcttcataagaaaccacaaaaggctgaatagtcaaaacaatcttgaaaaagaacaaaatatctggagatctcacacttcctgatttcaaaacatattactaagtgacagtaatcaaaacaatgtggtactggcataaagacagacataaaaccaatagaacagaatagagccaagaaataaactcacacatacacagtcaactgatctttgacaaggatgtccagaatatacaatgaagaaaagtcttgaatggtattggaaaatggtattggggaaactagatattcacatgcaaaagaatgaaactaaacctttatcttaaatcatacacaaaaaatccactcaagacttaattataacacctgaagctgtaaacctagaagaaaatttagggggaaaatttcatggcattggtcttggcaataatttgagatgctttcttagagagagtttcagttaagaaaatttttcttaacagtcattaaaaagtaatgtataaacttcaagtaaaacaatttttggttggggctttctggttgccttagtcaactcaggccgcataacaaagtaccctagactggtggcctaaacagaaatgttctcacaattctggatgctgagaagtccaagaccaagattggctgatttggttcctgttgagggctctcttcctacatacagatggctgctttctcactctgtcctcacatggtgaagagagaatgctcttgtgtctctctctgttcttataagaacaccagcactattggattagggcctcatccatatggcctcgtttaacatatgaattctaggggaaacaagatagatttaacctcaacctcaacctcatgtaaccattggtgattaaggcttcaacatatgaattataggggaaacaagattcagtccataacactggcctaataaatacttttcagaaaaattggccttttatcatatcattgtgtcaaaagtgtgctaagcaagtccagcttatcctctttcatttatagtccagacatcaaactcatgctatcatttccatcttgaatctctttattgccctgtgttacttgggagtgtcactgacaagccagaaacatatgttgtatatttccagtaccacctaatgttttactcataagtaagcatatacccttcatctttgtaccagtgtgtgtgtgtgtgtgtgtgtgtgtgtgtgtgtgtatgtgtgtgtgtatgacaggatctcactgtgttacccagactggagcgcagtggcatgatttagactcactgaagcctcagcctcctgggctcaagtgattctcctgcctcagcaccacaggcttgtgccatcatcgtgcctgacttttttttttttttttttttttttttgtagaaacagggtttcatcatgttgcccaggctggtcttgaactcctgagctcaagcaatccactccccttagcctcccaaagttctgggattacaagtgtgagccaccatgcccagccctgggcttttgtttataaaaatcatctgtgaaaacaaagggtaaaacgtgtctgttaaatatcttaactctgtgcaaatatatatattatacaagctaacatgtgtagtataatttagctgtgtaatcttgtaaagtagctaaatatcatgccttctccgggtatcctacttaaatttaatatgcagttttatgattgattgggaaagattgccatctgtgcatatcactgtaaaatgctagtttctacagtctcatctccatagataatcagagaaaagtaaatattaaaatggtgaattttgcaaatcattattttgtttacttcagagaagctatttgacctgcagggaaattttcaatagagaagtatcagtggcattgattagaaacgagcttcataaccttgtgatattgataacaatgggtaaaatatttagtattataaagagggaaaaatgtatgtagtcatccagttacagttactctccccttaagctcaagggtaagcctcccctccccttgagggcaaagcatcaaaatgagttccaatgtgttggctaacagcatgagctacaatacacaggggagagtggagtacaggaatataaacatcagtataattgtgacctgaggtccccaagctacaccctgtgtctggagacctgaggtctgaaggactgtttctgctcattatattcagctggagccccacctaggttgttgggacctccaagccttccacacttcctggtaggaaattattctttctcctcagtgagtaatatctagaaaaaaatcagcagtctccaccctccccagatgttatcacactggaattatggagttgggtggagacataaaagcagctgaaacttttagagcaatctggctccagcatctgtcacctcattgattgcaagggctgattcaggtgatttggccctcagttctcttcctctttcatctctccctttaggttcttcccaaagccatgtgttcaaataaagttaaagagaatgacctagatgaagatctccctgggagaaaaagagtaataaaaatgaaaaacaatagctgctaaataatgggagtgtactagctgccaggcaatgtggtgaatgctttccaaacattttctcttctaatccttataatggccctagagctaggtattgtaattatctttatcagcagtgaaagcctagaaaatacagcaacttgccctagagcacccaaataggaagtggctgaaccaagatttcaaatttaacctgtgttttctaactcttaaataaacatcttaacaggaacatttttggtaggtcaatattttctatgtgccattgttcttactatgtagtgaaaaaggcagctttcagatggtcctggcttcagtgatggctcccaggattcccagcgacattcagcaagatcttccctgtgagtggccttcatagatgcttcggtaatggaggctgctattgatagaggttccttagcagctgctccactgaggccctcattgccccacccactttgggcttcatactgggggtcagtgctaagtataaggtcctgatggctaggatagatgaggaaagctatttactcagcacagtagcaggactctggctcaggagagggcccatatcatggtcaaaaataaattgggaaaagtttaaactagggaagcagtgtctagcaaaaggccaaaaagatgagaaatgaccttcagcagacaaacaattacaaggtcagtagacacaaagtatgcgagcagttgagagcgtggatgaaaggtagattggaactgtattaccatccagtaattccactgaaatggaacagtgtggagaactgggagtaattagttcattcgtcagtttgtccgacttctctttgtttcttgkagggggctggttccatagaaaaggatgggtctgtggagtaaatggtcatgagtagtgctagccacacacattctttaacacttctgaatgcagcaggccagctggtcattactgttactgccccctcatgggagaccaaatatagctatatcattcctcctccaaaactgccttctggcaaaagttatctcttttaagaattgtgtgcattcttaaattgcattaagggaagcaaacatatggaacaagaaagcacctcacttagttccatttgctaagcccttttgcagacccactgacccttccttaattccaaatgaaatctcaaatgctataaagaaacccgccaaatgggttacagcaaagacttttttacaccctactgttatgttcagaattggaaaaagctggggatttggcaaattccaaaatgttgggtcatatgaaaacttttttttttgagacagagtctcgctctgtcgcccaagctggagtgcagtgacgtaatcatggctcacttcagcctcgacctccttagttcaggtgatcctcctgcctccacctctggggtagctgggactacagataagcaccaccacacccaggtaattttaaaattttttgtaaagatggtgtttcaccatgttgcccaggctggccctgaactcctgggctcaagcagttcaccagccttggcttcctaaagtgctgggattataggcatgagccaccacacccagccccatacgaaaatttagtctcagaattagcctttgcatgcgtcacctgtaagttaatcagaatgttactttcaaaagttccmtgcaggtgaggaagctaaaaggtattcttgtatttttttaaatgaaacttcataatagaggtgtaaacagagtccattctccccagccttagaatcagacagcttgagtttaaaacccacttatgagcttgagcatactactgaacatagagtcacttgtctatgcctcagagtccccatggtcgaatggaaaatacagtgcctacttcaaagtgttattgtgaggattaaatgagataatatatgcaaagcacagcgcctggaacatggaaagtgctccagaagttttattgttattaacattattattattgccaccatcatcattaaacttggtaatttttactctccccaatcctttagttactttttcaaacttctagttttttgcttgggctccatctaattggctgtgagtcaaaagagaattcaccacatccaagtgttttctaaagaatgtctttggaaaattcacaactgatcattttgataccagcatctaaggttagggctaccttatccttcatcaccttcttgttttattcataacaccacgatgtggactattgataaaattatgtttcaaagataactagcttatttgaagccatctataatttcagcccaaactgactaattaggctaactttcagaaagttaagtaagtgtctaattctcagttaacttactacctactgagtaaaaatgtgctgccttttaaaatccacaactaacctccctactcaaggcaaaccccctagttctaatatttgaagtatttaatgaacaagcctttttgggggtcctcttgtagttaaaacatttatttttctcctttttttttttaactctgttttttgtctttctttttttttttttttttttttttttgagacagagtcatgctctgtcgcctagattggagtgcagtgacacgatcagtcactgtaaccttgaactcctggtctgaagcgatcctcccacgtgtgcctctaaagtgtcgggattacaggcatgagctactgtgctcagcctctactctgttttctaccttttatttgttgcaaaagcaacatgtttattttaacaaatactggtcttcctcatcttactcccctgagatttcaatgttaaaagttgatttgtgtgtttccacgtaagtctttataacaagcttctgctgacactccttggcccagctttccataaacacatccatccctacctattaggttgaactgtacaaaattgccatttttataggtccccactattctttaataccaagcctcaaatttagccagacactaaatgtcctgttttatatacacgccttattcattccttcttggttttgtttttgtggcttcacttttgctggatggcctccacccccaaccccagctctactctggctggacattttttaactctccttcaaaggtgtacatcctgcaacttcttaaattccctttacattcattgtctacatcacatagtctgattgcctatataatacaatttcgtgttttagtatttatatgctatttaatacagatgccacctgttttgctgcttttattttctctggttgcttgatgttctattaccttractagactttagtgctttctagaaaaggacaatgtgtagtatatctgtacttattcaagtgctgatctaaggacataggatgtaatgtaaaagtttattcaatgactatttcaaaatacaaagtctctctttgtataaagtcattcactaatactgacattggctgatacttcagactggagattctcggtaatattactttttcttgataattaattttgattatamgaggatttaatatcatggaaataaattatgcaaatgaactcagaccctaggttcacttcccagaacaaaccgtattctgagaatacttgtggtgccaaaatttagagtgaaaccccagactattaatgatgctcaagttactttactccaacacaataagtactcagtgatttgttacrgaaattcaattaagtcttctcaagtattttttttcttttcttttttttttttaattatactttaagttttagggtacatgtgcacattgtgcaggttagatacatatgtatacatgtgccatgctggtgcactgcacccactaactcgtcatctagcattaggtatatctcccagtgctatccctcccccctccccccaccccacaacagtccccagagtgtgatattccccttcctgtgtccatgtgatctcattgttcaattcccacctatgagtgagaatatgcggtgtttggttttttgttcttgcgatagtttactgagaatgatgatttccaatttcatccatgtccctacaaaggacatgaactcatcatttaagaaaaagtccaataaaatatcagtcactatttttagatcttcattctcaatgtttgtaaagctaatactaatattagattaatgtaattttatcaatattgataattacttagtatacattgtgaactttgttttttggatgtcatttaaagggttattttcatgagttcctaagaaataatttaggcctttaaggttatttaacccttcagtagaaaatagtttccttgtttaagaaaatgatctccatctagtggacaaatttttatattacagtatacaaagaaaaatattaaagcccctagaatatctcatatcaagcacttcctgacctattaataaatgttttggttttagtgctaatattatggcttaaaagttgtaagatttaaaaatatcataactatctaaatgacttaaggtatttagcaatatttgtttcaaaacttatagtggagtgttaagacttgcttgatttaattggaaaaattataattaaagaaaaaattactgatttatacaaatttggtgtttactcagttgaactgaaaaaaactaaaccaaaactcacacttctgtatctcttacatttctgttcatgcacaggaaggagggggtattttcttttttaaagtgtagcaataagaatatcttgatattaaagggaaataaacataaacatttctacaggcattcacattactaggtcctcctcatgctgaaaagctgccatgactatcttcttagaagagaaatctactttgccaaacccccactatttagaagtttttaatgtcttccagttgtgtactaaataccttcaaaaaccttcttaaatactactcttcatgaaaacttctcagatatcccagcctgagttagtcattcatcctttatttttgtatcttaatgcactcatattaagtgcttaataaatgcctatttaagcatatccaaggagagtttgccaaagatccctaatgtatgtctattgaatgattagagaccatcctccccttccagccttcctgggaattgacaaggtttcacatacatatgtgcctatcctattctggtgaaacagatgtcccctgtttgggtgccacatatatttgtggtttatataatcatgcagtagagctggaaggactttaggaacaatcgatgattcaatgcagttagctcagtgactggtcaattaacttttctaggacctggtatcctcgtctgtaaagtgagtctgttcgacttgacaatctctcattgtccttcctgaaccaaataaatatatctataaagagacacaattctaagaaaattttaagttggaaaaacatatttacagctgctcaagataatgagttttccctcttctgtttatttgatggattatttcggagccactgttatttgatcacagattcwaaagtgatccatgaaacatcttccaatcttagagtcataactctatttattaatgactccgataaagaaaataaaggaatgttttaaaatgagctagttaatagtttgaataaagattctaatggggaaaatattaatgacagcaaaacttgaattcacatgtttatttattctttcaacaagtttttctttaaaaccacacacctgctgggctatcataagctatcaccctcctctcctaagaacacatgaaagttgactttattttaatactggttgatgtttcactagaaaggttctttgtggaaagtttatctagattataaggactatgacgttaagaactgtgtgtgtagattttttcccagctctaaaatatgtattgctgagcacagtgccttttattcatttaatcatttactcaagacacttgggcacagttttcaatgtgccaagaatacgctgagtctccatttgtagagagctcacaatctaggaatggagaccgggtgaaaaacattttcaattcattgtaaattctgtcattagggagtgggaaagtgtcttgggagcgtagagaaagggcctttcataaagctctgatgtaccagggtagcctttcaggtgcaggctaagtctcaaggatgagtgacagttaggcaggggaaaggggatttgattatttaggggagcaggaggtgaggtggtgatggcctgtgagaaggagatagtgcctcaatatgagttgagcaagaagtacccaatagctgaggatggcaagttgaggctgggggcaactaattgcaattgagagcagatggttagactggcagtctggcaaagaaattttgacttcatcctgagagcaatggtaagttactgaagggttttaaactgaagaatgacactggaaaatggattcaagacactaatataaaggttgttataataatataggtgaaatttgatggagacctgaatttaaaatattggtagtagggatggaaggaagtgggtacaatagaaattaatgcttggatggatgttatagggyaggagtgtggagggagaagcccaggtttgggagaacagcattaggcacaaaatgggtatttgttgaatcgaattcaaatatttgatgaattactgtgtatttgttattttccgaaaggaattttgtacttagaagattatgttttgcagagtgtttcccttttaactgaagtagagtttggaaaaacctgtatcttgtatctggtcagttaacaacagtatccaggagaacaagaatgtgaagtcaatgtgtttttcttttatgtatttcaatattatcatatttttatggcagaaattagctgtaattttcattcctgctaattccactgtcagttcctcagctgacgctaaatgctttttgaaaatatgaacatgtgaatgttcacagcaacataattccttctccttcctttacagttttgatgtggacaatggcacatctgcgggacggagtcccttggatcccatgaccagcccaggatccgggctaattctccaagcaaattttgtccacagtcaacgacgggagtccttcctgtatcgatccgacagcgattatgacctctctccaaagtctatgtcccggaactcctccattgccagtgatatgtaagtacaagggcaggcaaagagagagaaaaccgagtaaatttatatctagagctgatgacataataaaactaatgacttttgttcaactgtatcactctcctccaatgtagaaagaatatgaataaaattatacaagctagaaatgaatggtagatttaacctgagtgcactgtcactcttgattaacacacacacacacacacacacacacacacacacacgcatgtatttattttcccagaaaatactttataggaaaactgagaattaaatttttaatggaaactaacacttaaatcattagcttatatttatgtagagcctgagttttagctacctaactacatggatattttctaatattttgaaaagctttcaactccattgaaaagtcctgtgataatagactgtatagcattttgaatatatttcaattaatgtatgtacagatgttagcactggtttgccagatcatttaagaaatctttgtgggactttgccaaaattaaaccaacttttaaggatcatgagaggcaagcacagaaaacattagacagacttgaatatcatttaagatatagtacagcttgaaaaacaatgaaaactgacaagcaggtttgcagatcctgtaccatcactagctcattttctcagtgcatttcattcttgtggtagtgtgcatgtttttctacataggtctttattctcactcaatacctatactatcattcgtggcacatctgcctctgtatagaatcgatcttcatctttctctcttggtctatacatttgtccaataacattcaccatcttttcatgacacccatctcaaaaactcataacaggctgcaatttatcttataagaattagtctgtatggaacccctgagtgtctagtgttattcttgccattctaacagagcatcagttgtattgcaataggtctacatggggttctagaaatgaaattatatttcactcatttttacaaactatggttgctattttagcagttgtattattgacgtctacccttcttcatctctaaacaactttctattcctagtggccctatttttacattatttttatctcacttccttagatttgaaattcatgacacttacttattcattcacacataatgagaatgcttcttgagcaaatatggtgtatttaaagctctgaatctgtggagcagtgaggtctggcattttagaccattgtaataaaatatggtgagcacaatccttgaggcatttatcatgtactgmaggaacagagagaggagatggagagttttccacccaagggaaagatacagaaaataccgggctaagggaacaacatttactaaatgtgaggcatggaaaattatggctgaactaaggaatgacaatctgcttgatgtgaatagcgaaacctggcaagagagaagaaaatttcaaatacagtctatgggacctgagagccacagaggtttttagctgagttttggcatgatcatattcttgtttttattgcatcttgattactctattgttgaatgattgcatagcgaagtcactacagggaagtatttcatgtcgaaattcacagaagtaaggcaggctaaatatgatgaagacctaagtcaagggagtgatggcagtggagcaaagagctggtttagatgcaagaggcttatagaatggttgtgtgtgtgtgtgtgtgtgtgtgtgtgtgtgtgtgtgtgtgtgtgaagtatgtatgtatgttgggggacagccagtggagaaggagartcaaagagagtgctgatttttgtccatgaatgagtacgtacatggtgatgtacgtacatggtgatgaggaacaaagggcagagagtagaaaacatgacagataacaggtgatgaattggtttgtacatgataaggctaggggaaacaagacaacagttaaagtactgggacagcaaacagaaataacagtccagaggaccaggagaaatagaacagttaccttctataattactaggtttttgaatgacagttgagtggtgcgttgtattcaggtaatagcattaggagcccctgggttaaggagtgaattgaaagtggaaatgtgagcaaatgcaggcatctctttaaaaggctgatgggtggagtaggaagaaagaactaaggctgcctgacagagaattaggttcaagcggaatttttttgaattcaggttacttgagctgagggaaggctccaggagatagaaagagactaaaaattcaaggggaaagagggtttaaagatggagctgtagttgctgacaaaaacatgatcatgagccaaagtaaggaggctatccttggaaaagtagtaaataccagaactgtattctttaggaaggacaaagaagacctgccttggcaacatagtgagaccttgtccttactaaaaatccaaaaaaatagctgggcatggtggcacatgcctttagtcccagctactctggagaggtaggaggattggttgagcctgggagttcagggttgcagtgagctacgatcatgccactgcagtccagcctgggtgacagaggaagacaagactgtgtctggaaaaaaagaaaaaaagaagaaggaggagaaggagaagaataagagagaagagaagaaggagaaggagaagaagagtaaaagaagggaaatgtaaatttagagatggaggagtaaaatgttaagagatattagccatgagttctctaaacattttactcctccatctccagatgaatgaatgtaaaagtagaaggtacagccatcaatagccagaggagagagggatggggcagcttgagaagaaagggaaaggcttaaaaaagccactatgcagatcaaaaaagggaacagggtaaaggtgagtagaatactgaccagccccatagataacaataaacaatgttaaataggcgaatgacagaattgaaagtcatctaatgcaacttcatcaaaggtgagtcaggcttggtattgacaaaagaaagaggaaaactcacagtgagttagtggagtccatttatgtagttatgtgttctacctttttaaattgtagtaaactgagtttgggatagattgtttctttcatacattctactccagttagtaaatattaaatatatacatatattttatgaaaagcttatagcatttcatatttaaatatgaaatgcttttatttcaaaatcaaacttgcaaggatacctcattttgctgtgtgcctcaagagttctttatctgatcagactcaggtaggaatgatgagtttaatcagaccatgagtcaacactatattttgctgaaaagtaatgtgtwgatatgtttagctttccattctccttggatatttacattggagcagtaagatattcctttgataccaactcctagaaagcattctttctaccaaggagattaagtttctgtggaaggaaaaggaaatagaataaataataactatttcaacatttaatctgacacgacacatatcttccaccataaaggactgtgccttctcttaatttgaattctcatatggccatgtgtaaactttaattttctcaccttacctagttcacaataatgctatgaagactgtctgatgtgtataattcaactgcgctttatagagaatgatgttatatatttaattacttgatgatttcttattaatagttctagttaagctttcctattgagaaattttcttagaaatttcaaatacaaacagtacctaatgaggataggtacctaatgaagggtatttaaaatgaaggtttgtggttatctatttaattgaactgttttggaaaacctttaaatactctttaagtttaaatataactatttactctattgggaaagtgagaagaaggaagataatcccttcctagtagataggatatcgtcatcttatcctctataaatagaaaccaatgaaatagctgaagaacaaaacagataaagatggtagtaataataatcataacatacatggtgtgtgtatatcatcaactttcccaagtattttcacaccagctatcttatttgatatactcacagtccttttgatagggacattgttatgccattttacaggttagaaagccaaagtccaatgagcttaatcttttgaaaaaaaagcaagcattttgattatttctaggagcacataatttgataatgccattgtaaacaaagtactttatactactacagcaaaaactgctgagaaacagaagtaattgttgaccaaattcattaaaccaatgaaatacatagcagtatcaaaatttgattaagaataaaataaaagctcaaggaggtacaaagtaaatatgcagccaactcttagagaatgtatacaagtatatagcactaggctaaattcagaatctaaaaaattagctcatataaggcagaagagaagttcctgaccacttctgctcagagaccgtcacacaatttgttaaatatagatgatgcagtagcaacttaattcttaagaaaagtaagaaaaagaaaaatgttaagtattagcatgagtctagtaaataaatacatgaaaataaacttgcattaccattaatagtaaaaattttttataacagtagaaacaactagataacaaaaggctggttgcccaagtggtgtcatgaagtaacatgaagaaaattacagcgtaaatagacaatatttttgtcatcttaatatttcagcatctgaataacaatcacttctgtgttttcacatcatccagtaatatagtatctgtatttggaaacacataaagttatgatacattgcaaagattaagaggagaattagcaatgacaagataagtagaattaagtcacaaaactatgaatttattaagtataagttacctgtcaaactacttaagttttaagaaatactcaattcacctggataactaatcctctattccccatcctctgttaaattaacaccaacacatagaatgcaaagatgatccaatcggctcttcactcacattcatatacattgcttctacacacagaatatggggtggggtgaatgcattcagagggccagtgacgaggaagtgagtagatttgatataccataaaaagctggggcatatttgggaatctagctaagttatccccaggcactatacagatatctcagacctcactgatcaggccttcggggtgccccattggggcattttctcagctagtagataatactctccctacctcccatgtcaaactactgtcctttctttagcaattaacaagtccctcaccacttcttgggcctctaatgtgtgttttcagtcacagccactcctctctactacttttgcctgctaagtataagagtagtattgcttccagtcctgagtttgaaaaaggaagaagaattccctttatgtcaatttgtatcttttattccagattattaatcttccctggtctcactaggaagaatataaataaaaagacacgttgcattacaaaggttctaattctcactggatctacatgaaaagtttgtagtcatctcttacctagattgcaagataatattacactaatgaacatttcaaaagcatatcaatttgttatcttgaaagctttcttccattaaccacagaaagaaagctaccatggccaaatcatctcttccccagttctgggtttttcccagctggggaggtatcctcacccctcaccctgtggtgtaggagtgatgggactagggccagagttctcaaaatgtgtcctgaggcaacagagggaatgtacatgggtgcaagcgttattttaaatgttcaagaaaaacacgaaaacatctgtcaaccacctggaaaactaatagcttggaatagttcccagtttccaattaagaccatgatattcctttctgtgacaccatatctttgcaaaattgggttttcagcagttgctggataaaaatgaagtgctgagcagaaatcaatgtgcaacaaaaaataagggaggcaatgtccaatctcattccaaaatgagaaattgacatagtgctcagtgggtgctaaattgttagaacaaaaccttattaagttatttggacttaactatttaataattggaactattatttattttggccaatgtgttgctgttattaaaaaattgagatattaagggcaccatgtactgagaaagtctgaaaatatttggattagttgtttattcatatctgaagaattagagctaaatcaggctaggcatggtggctcacatctgtaatcctggcaatttgggaggccaaggcaggcagatggcttgagctgaggagtttgagaccaacttgggcaacatggtgaaaccctgtctctacaaaaaatacaaaaatttgctgggcatggtggtgggcgcctgtagtctcagctacttgggaggctgaagcaggaggatcacttgaacccaggatgttgaggttgtagtgagccacgattgagccactgcactccagcctggatgacagagtgagaccctgcctcaagacaaaaaaaaatgattaaagataaatcagatctctatgtgagactatttgagagaattttgttaggagttaaaaaaataacagtttccaagctgtgaagtatctgatgtgctctagagtagagaatttatctttttcttaattctgttaggatcccaggtagccaaaatctttttttataaaatgtgatattattttggtaatgacctagatagaccaggctttttcttccattgctgtgtgctggccactgttactagtattattcggagtgttgatgcaggcattaatactagctattaaatctcaagaagtttattggcaaaatatgctaaggtcatctgctactagaatacctttttactatctttttgtttaaaaattctgctttatttggtgccatttattcaatcacttaagtcattttatttctgatttaaaaaaatgggagtttcatgaattgtaaaataagtcttataaattagctaaacawgtttcttcaatccttgaactgggggatttaaaatattagctgaataggcattttatattcctaatctcatactttcaaaaaaatcataaaaatgaaatcctgatgtttagacattttaaatggtaatgtttttaatgccacagtataaaaataaagcattgattttaatgcactgctacagtgagatggtgccagcacctctaagtatcattgccagtgctctaacctttaaaataacgaattaattgagttatatgtagtaatatatcttggctattactgccaaagtaatagatatatactgaagtcttaggagagatagagggataaatgttagtyataaaaagttgttaaagcagagggaaaaagaagtgaaaactgaccaaacatatacgtaattcattgtttctatgacaagcctgctgcaattcgaactctaggactttgtgctaatatttagcataccattttattttctagatttcctttatactcactatgttcctcagtatttgcactcacttcttttgtttgtttgttttgagatagagtctcactctgttgcgcaggttggagtgcagtggcacaatctcagctcactgcatcctccgcctcccaggttcaagcgattctcctgcctcagcctcctgagtagctgggattacaggtacctgccaccgtgcctggctgattgtgtttttttttttacttttagtagagatggggtttcaccatgttgaccaggctgggctcgaactcctgacctcaagtgatcctcccaccttggcctcccaaagtgctgggattacagactgaactcacttttaaatcttttaaatgtgaaaaaaaaaactctaaaaatcatgtgagtttttctcactcctgtataaaagagaaagagtgtgaaggtgaattatttaaacttataaataatgattatataattatgcttatacatcagatttaatacatttcaaaggataatatctactttctttaaaaaaaaatgcagggagaagtggtagtttaataacaagagcaattattccacaatcctatgagacactgaattcctgccagaagaaagtaaactcagaattggcctcagtcaaggaagattagcctatttttcagtgcataccaaaagaatgcaatctctaagagcacattatgtgtgaaataaactaaaataaggaaagtttgaagaacattttgaaagaaaaaaactagtccagtaacctggatagtgctctcaatgaaacacggcccctagatgaaggacccatagttgaaaattactgattcttcctgcctcttgaaattccaagaggcaaatggccattacaggagagatattggttcacccagttgtggatattgtacctagaggtacactagtgtactctcactttatctcaaccctcttccctctgtatattaaagaagactaaaatcaaaaccatgctccagtgtattgtaaaatagaaatattttgaactttaatttttttttcttttcttttgagacagagtctcactctattattgcccaggctggagtgcagcagtgtaatcacagctcactgcagccttgagctcttgggctcaagtgattctcccacctcagtctccctagtagcccaaacacaggggtatgctaccacacccggctaattttttttaatttttagcagaaatgaggtcttgctatgttgcccaggttggtctcgaattcctgagctcaagcaatactcctgctttggcttcccaaagtgctgaaattacaggcaagagccactatgcacagcctgaactttaagtcttgacggtggggcatatggtggcaggctgggaagaagaagaaagttgacttctattggagatgaccaatacgtgttttccaccacattctaaataaaggtgtgtattaattgatgtgcatttttgaatgagtatcactgttttactcgtttggaaaataacagtagcacctactccatgccagggtatcatttgaagacaccatagatccatgaaagtaagacaaaaaaattgtttggagcatgcattcttgtctttatttaatttttaaaaattcttgatacaaaaggagatgtttccagccaacactgagattcccatatgaatacttgttttcacttacacatcaatcattttaaatatttacttttgcttgtcagtcttagcttcttaatgaattgttctcaatgtctcctttactgttttctgagccatataaggaaaaacagtcacactgctggaacatttatgtgatgtgtttcttgagataagatattccagggagtattactaaatcatactgtctaagcccttgcaatatgaatcatctaaagatgtgcttctataaataaacagaaagaaagcatcaagcagacccatggtttttctttagaaaaccaagtaaggaatatcaaccactgggctttgctttcagattcctggtaatctgtggtatgattcacaccaggttcacagaggaaacaaccccaattattccgtctgcctactgcagcatctcctaggctttgtgtccacctacggttaattgccttgagactttatggtttttcctaaccttgggtcaagaaaaatttgctgacattgaatactggaaagttgtatctaaacatatataatgtgtcaattcctgcaaccctctctttaagacgcagggaacttcagagcagaaagaaaaagaataactgctcacccctcaacaaatgtggaaggttgtgatgtgacaagaaatcatttcaccagttcagtaaatgatgttgtctcccaataaatgtcatgaatgatcccaagtccaaaattttttaactcattgtttcactcccaagggagaacaaagctacatgcagatctcatatttccatgtttcaaaattcattttttctttggtgcttacagaacttcaaattgaatttgttataaccaccaagatcagttttgtttttgtggattggtgtgtgtgtgtgtgtgtgtgtgtgtgtgtgtgtgtgtgtgtgtgtttagctagtggatagcatattagacagcaccgagagtcttgcagaatattctgttgcagaaatagaatgttgcagaaatattctattggacagtgctgttctagagtctaaaacatttacttctatgtgccttcagaatagtctaaatccatttgagcatacagaaagcggcatggtaaaaacaaaacagtatttgaaggcctgggctcaaatccagctacactgaacatttccatgccttgggattttatgacccagtaaaatttctgggacactgacctagggttactaactccttattttgccaggtaaagaacattaacaaggaattacccatcaatatatatgttaattttattttttaaagacattttcacttcagtgaaaaagaaagagcataatctcagaataaaagaattttccaaaggaataygtatagtttaaaaaaaaaatctcactgcatggtccatgtacactctgactttgacaaggaccactgagcattctgttgggcaagtaccagatcttagagtggcatttggaaaccactgagttctgtcagcttgtcaagggcatgactgccaatgagtaacttaagttgtcagggcctagttccttatgttagaatgggaatatgagcatccatttaatgcagagttgtcaggattaaattcagcatgttggtagaacaccgtgtctggtgcctagtaggcattcataaaacacattgctctcctctctgtttgatcaagggcttccttttaatctattgaatcttttcaccacatgcagacctttaaaattgttgcactagttgaccaaaaatcttttccctaggatcccattctggtgaaaaaccaaaagggcagggccactggcattaagaacaagcctgccaataagataaactgtgaaagaagatcccgttcctagaacacaaagtgagagcacttgtgaatccctgcccatgtactcaactctttcgctgtctttcttccctccatggaagtcagactctcagctttgtactcaaaccttctggtgataatttgggacatcagccgtcctagaaaagtctctctattgtattggtttttrttaaacaaaataacctaatatgcttagtgaatatgtctacacacatgtgctaaacatttgtttaattatttaacttggaaaattttggtgtatcatttctaacagagatagtctttgtgccatcatataactaacaaatttgaaggcattcattggcatcatgtattttctctaatgagtcctaaattgttttctcatgacaaataaagagattccattttagactagattattttttgcttatgttgcrtaaacttcagtcccatctgctttatcatcagtgcctgtcctccacaagtgatatgagcacacatgagccaaaaattaaggatttttggttgaaagattttttttttttttttggtcaaagatggggccgggctctaattcttgttttaaatttatttttcatcaacaaataacaaattatatgcatttattatatacaaggtaatattttgatatatgtatacattgtggaatgattaaatcaagcaattaacaggtccatcacctaacaatttatcattttttgtgatgagtacatttaaaakctactctcagcaattttcaggtatactatgcatgattattaattatagtcaccagcctgtacagtagatctcttgaaattgtttctccttctaactgaaactttgtaccctttcaccaacatctcccattccacatcctcccattctcccccaggccctgctccagtccctgggaacaactgttctactctctgcttctataagtttgattttgtttttagattccacatatgtgtgagatcacatggtatttatctttcttgcctggcttatttcactaagcataatgtattctaggaacatccatattgtcataaatggaaggatatcccctttttaagcctgagtaggattctagtgtgtgtgtgtgtgtgtgtrtataacattttctttattcatctgttgttagacacttaagttgattccatattttggctattgtgattaatgctgcaccaaacatgggagtgcaggtatctctttgacatactgatttcattttctttggatatatacccagaagtagaattgctggatcatatggtagttttatccttaattttttgaagacccttcatactgttttccatagtgactgtactagtttacattcccaccaacagtgtaaaaaggcttccttttctccatgtcttcaccaacatttgttacctttttttgattaaaaaaaaactattataggtgtcaggtgatatctcatcatggttttaatttgcatttcacttaagattagtgatgttgagcacttttacatatacctgttgacctttttttgtaggtcttgttttgattttaatttttttgtagagaaggtgtctcacgatgttgcccaagctggtttcaaactcctgggcttaagctatcctgctacctcagcctcctaaggtgctgggattacaggtgtaagccactgtgtcaggccattgttttgagaaagacctattcaggttttttgcccattttaaaatcaggttatttgtttttttgccattgagttgtttcttaattcttaaaatattaataagatgtgagcaaacagtttaaatttcagaaaactaaatatctttgaaggtcactgtactagtctgttctcatgctgctgataaagacatatctgagactgggcaatttacaaaaggaagaggtttaactggactcagagttccacgtggctggggaggcctcacaatcatggtggaaggcgaggaggagcaattcacatcttatgtggatggcaacaggcaaagagagagagcttgagcaggggacctcctctttttaaaaaattagatctcataagactcattcactactatgagaacaacgcaggaaagaccagaccccctaattcagtcatctcccaccaggctcctctcaggacatgtggaagttgtcggagttaaaattcaagatgagaaccccatctcaaaaaaaaaaaattctaacctgctttaagaaataaaaatagtggtttgcacttgtaattccaactgcttgggaggctgaagtgagaggatcacttgagtccaggagcttgaggctgcagtcagctgtgaattgtgccactgcactctagcctgggcaacagagtgagaccccacatctctttaaaattttttcaaaatatttaaaatgatcaaaacgggcgaggcgctgtggatcatgcctgtaatcccagcactttgggaggccgaggcaggtggatcacgacgtcaggagatcgagaccatcctggctaacacggtgaaatcctgtctctactaaaaatacaaaaaaattagctgggcayggtggcaggcgcctgtagtcccagctactccagaggctgaggcaggagaatggcgtgaacccgggaggcggagcttgcagtgagccgagattgcagccactgcattccagcctgggcgacagagtgagactccatctcagaaaaaaaaaaaaaaaaaaaaatgatcaaaacaccagaaaagctgcatacacagatatacaaacaggtggcctgagtttggcgttgaaaagtttcaatttggaagatgttacctcacacaatactagacagctttaatgttactcatatattaatttacattttctttgattctcagtaaaaggttgctggacattcttgccaaattgaaagttttggtagttgtgatttttaatacaagtttttgtgttaaatagattattttaattctaagtggcaatagcttcaaagaggaaaagcacattcacttgtaactgaagttggctttattatattaggaactttattccctagggtttcataaatagatgtactgcttaatttattttgacttaaatggagctagtttcaaattaaaaggccaagcaatacagaggatccatatcctcaagtatgtctaataccaaggaaacagtttttatgtatttttggtattgttttatttactatatagattacttagagtttataaaaaaatctaatgcctcctttataagtaattttaaatcattcattatattcttaaatttataatttgtcagagtgaacattatttttggaaaaacaaatcatctcttttaaacgctatatggaaaaaataatttggttttgcaaaattttcttggtagtcacattttacagaatttttgttgtctgaaattagagtttcatgattttaatttaagcaggtagcaatataaaatacttaacattcccatgaattacctgtgcagcccagtttctcatgtagcattttaatatttacctttgtcttatgtatatttaattaaaataagcatgtttcctttaataagtagctttttaaaaatgaatgaatgataaatgaactgaaattcgtctgaaaaacccatatgattattttttaatttatttaaaaatagaatcaatgcttacattttaatacatttggattcacataacttgaaaaattttagagattaccgaatatagattggaatcattaacaatattttaaaagaataaaggcatgtataatttttatggttcattaatgtttaatgctaaaagcaagatatacagttgaatatacactatgactctaattctataaggaagtatgtagtccataatagtcacatactatattgcatacatgtgctcacatacatgcagtgggaaaatgttatcaatagttatctttgaatggttctttaagttgttctatatctcccaaagtatgtatatgtatgcatgtacttcatatgtgtgtatgtatatatatacatacacatatgtatgtatacgtgtatctatacatacacatatgtatgtatacgtgtatctatacatacacatatgtatgtatacgtgtatctgtacatacacgtgtatgtatacgtgtakctgtacatacacgtgtatgtatacgtgtagctgtacatacacgtgtatgtatacgtgtagctgtacatacacgtgtatgtatacgtgtagctgtacatacacgtgtatgtatacgtgtagctgtacatacacgtgtatgtatacgtgtagctgtacatacacgtgtatgtatacgtgtagctgtacatacacgtgtatgtatacgtgtagctgtacatacacgtgtatgtatacgtgtagctgtacatacacgtgtatgtatacgtgtagctgtacatacacgtgtatgtatacgtgtagctgtacatacacatatgtatgtatacttgtagctgtacatacacatatgtatgtatacgtgtagctgtacatacacatatgtatgtatacatacacgtgtatctatacatacacgtgtatgtatacatatatacatacacgtgtatacttatatatacatatacgtgtacatacatgtatgtctacatgcatgtatgtgtgtgcatacatgtatgtctacatacatgtatgtgtgcatacgtgtgtgtacatgcatgtgtgtacatacgtgtgtgtgcatgtatgtatatgtgcatgtatgtatgttgcatgcatgtatgcatgtgtatatatgtatgtatgtgcctgtatgtatacatgtatgtatatatgtatatatgtgcctgtgtgtatatatacatgcatatatgtatatatgtacatgtgtatatagatgtatgtatatatgtacatgtatgtatatatacatatacacatacacacacataaagatcaagtaggttacattatatgtttgttttatatgtccatacttctatgaagatgggtctagagagttgtgagtagacgtggtcctcctatagctaatccttgggtgttgtcaaatagtctaggctcccagaaatatttttatattcattttaaaattagaacatacttgtttctctataattctaaaagaagttgtcaagggtgaattgatagatggatgatagtttttaggctgaggaaagaaagatactaagatttcaaaattatcaaaatcttggactttaaaatatatttcaaaaatattattttaattttctatatgtttatcaatttcctaatcctattgacaaacttcagaggagaatatctttctagtaagagtgagtgaagcacagaagatgaaaaaagtttgcacaagattccattcggccagcgcggtggtgcacacctgtaatcctaggcaccccatagactgagacaggaagatcacttcagcccaggagttcaaggccagtctgggcaacatagcaaacctccatgccattgaaaaaaaaaaaaaaaggattagattcaaacgtaagccccagcctgtgactccttcacagtgctagttcatgcattcatttgtcatgctaaaatttgcaatgtgtgatattcaaaagcagtgggtcttacatggccactaatgctttaaatatagtaggattaggggtctttgctccataaagtaaaaactttcttctaattaactgtatctccttttccttatgatttcgtaatagtaaaacagataaagattgccacctagtgtgtttaagatttcaaccaatcatgaaatgaacttctataggaaattatattttcaggtgctgatgttggttgaacttatttttttaagatgacaacaggctttttcatttttaagtacttgaaccatatatggatctcaacaaagtcaccataagagtgtgggcatttggatttcttgcttttagtttcttgcttgtttctgtttccttattacagaaagaaaaagggtagaaaataacgtgataaataatacagaagtagaagaaggatgggagggggaatagagaatagaagttcctgactctactgtcatttctcttgtgagaaaaaaaaagacaatagtatactgttgagccctgtattctcctgctttcaacagcgctggctcaggactcagcaagtctttctctttgggagagacaaggctcgccaggactagtgaagatgactctggttcacttcctggtaaccagggaaggtgacagagcatgtggcacctccttggacatcatgaaatttaaaaccaatgtgacactgactcccacagtgacctacagtggctcatcctggctgttctagaagtttctgcacttgcattctgctgtgactgttaccttggtaccaatctcatctctcacatacatacatatgtgcatacatacatacatgtatacatgtgtgcatacatacatacatatagacacgcagtgtcaaaatgactttttttctgagccttcctatccctcattcattctccgcctgtcctccatgaacactccagttcttttttttaaaagagctgtattttccttaaaacagatcacagctgttttttgttaagggttgttgttgttataattgtttttatttaaatgaaagacagtattgcatcatcctcacccaaaattcacattaccaggcggtacaatttcaaaatgtccaggcgatattcactgtgtgactttgaatctagcttttcagtcactttatagagaccctaatagtctcttcccatctcagaagagactcagaaaaatatttagccaagtaggcctaggaagccccaatttattacattgtattgtaatccctcccagccccactttacgtggcaaggcgctttaaaaagcttctgtgggtaaagttgttcaggtgcaagatttcagaattattttatttcataggatttttttgagcatatgtgattattcagttcattaaaacccacacatactttaaaccaaatcatattcacaaagtgaatcttctgttgatcttaactaccagatctgtttttaaatgattataagcaaagtgtaagacacaattcaaagatatgtttgtattatatttattttcttctaaccacaaataaaaataggttttacttgccttattctcctagtgacagtatgtctgaaaagatctgttttaatattgagttgaggacttagacaaagattttaaaattatatgttaggtatatattcaaagataatttaagcatgacatacttttgaaaataaatggataggctataacctgccgtttatcgaggacatctgccactgaaatgctaggtatcattttactgttactaaaatgagaccatcttgagatatttggcagaaacaatttctgggcaatttattaaaaagtaatatatttccttcactaaaatgataactgtctttatgctttcatagggaaaaaaggctggtaaattatcataaatattgtaaagtgtattacttataatacttataaaggagatacaaccaaagagaaaattaaatgttttaataaatatgcaacccttttgagttttgaaagattcaaatccactgcaatctatataaaaaattaggagacatatttccatggattcatttcagattgatgatgtgccttgtcaagatgacttagtcctgaaaaaaataaactttatagtaggtcaattataaagaataaaatgaaagaagagactatagcttgggacaataagaagatgtcatattattttaattttggttatctgaactgcctctcatccattttacaatacaatgtcttcagcttggccatgcactgaagcagatgaatagtttatcagactggcaaatcaagtcggcataggtggcatgtcttttctccttgtgtaatatacctcccattatggaatttttaataacattttttaatgtcagaaaccattgaactatcttgaatgcaatatatgtagtatatacacctattgaaaatgttttttgtcttcggacttctaacacactacacagtttactgatttgtccaccactcccaagaatgtttggcttcaaatgaactctaaaggtgcctttatgtgtgtagaaatttgtcaaatgctgaagtgtttagctctggattttgtcttcatgctttttaaacactggtgtatctgtaaatatttctcagttgttttgtgagagttaggctactgtttcaaaataagtacataagagaaattgcagccctatatttacctatatgacacagccagaagggaaagtcagaatgatgggccaaggaagaaatgtagctggccaaccctggcatcactttgtaatttgcatttattgggccattttcctagagctttatttttaatctttttaagctgttccataggaatcagccaatgcatatcacaaaaggggaccattccaggtatggctgtgcagcttactacctgcgtgtctttgtgttaaatctcttaatcaatttgagctacaattttctcatctgaaaaatgggagtaatgtcacctaccttgcaacattgttgtaacagctgatgattgtatataaaatacacttgctgtgataacattctttttacttttgtaaatgcttgaaattttcatatctttttttccccagaactttttctttcccccagagcttttaatgctgtcatcgtccctctctctctctctctcaactaccactgatttagtttaggtcctcatctcttcttttctctacactggtctccctgcttccatttttgcccctttaaagccctcaatcttttatagacctgtcacagggtctcaagagtccttcttagcgaagtatcagttttctgagtctttgcaatttcctgactgcataggaaagcaaaaatcattatgatttaaaaggttttactactgctgctaattattattatagaaatgtttattgaacatttactgtgtggtaagcacatttttcagcacttaacattattaatttattgaatcccaaaacatcactctatgtatgtgctgttatctccattttacagatgaagaggccaagggaaagtgaagtttaataacttgcacaatttcacacacctagtatgtggcagagctgaaattccaacccaaacttccatcagagagtaaaatccaagttcttgtacatttcatacaagggctctgtgatctgctgcctggctcgttaccacccatgattctgaatttcctgccttccatggcattctctagaatcaccgagcttctcgttgcagctctgtatctgcttctttctcatctaggcagctgctctgcctccttggcttcatccctctctgctggctcccacgggctcaatggcctccttgccacttcagtgcaccaggcctgctcctaccctgggccattgttctaggaaagagcctttctgggcttgacctcagaagaccttttttttttgagagtcaaggtaaattatgtaaattatttattgatgacagaagaacactatcttagtccagtttctgttgctataacagaatagcatagacagggtaatttatatagaaaagaagtttatatcttacagttctagaggctgggtagttcaaggacatggcatcagcatctgattaggatatttgggatgcatcatcccaaacaatggaaaaatggaagggcaagtgagcacatgcaaaagagaaaacatgaggggctgggctcactttataacaacccactcttatgataactaaccccctcccaccataacagcattaattcattcatgagtgtgaagccctcctgacctaattacttctcacaggcccccacctcttaatactgttgcaatggcaattaaacatcaacatgggaaaatacctttttcaattgacatcctgcctctaccacttattagtttttagaccttatgccctctctgaacctcagttgcctcttctataaaatgatcataaaacccaatgtcctaccttcttagagttctagagttctatgaataatctctacaaagagcaggtgccccttgaaaaacatgattctggaactaagggggtgtaaaataacacatgcttcctttacattgttttttccttcttctgcttttatttcccacatttttattttcaagatctccacatggtttgatgacgaccacagcacctattctagctattggtaacaatttattgagtaacatcatccatatgctccctgtgccccagcatgtttcatgggtgttgttttgggtcactcaggttgttttcagattgttcatgagtgagcgaaaagtttatttgcactgttctcagggccatgtccagggagctgtctgtgttgaataacagcattcacttttgatttaagaattttatctagctagatcaagaaatagctgatggtgactctggaaatccttgtctcaaattattcatgctaagaaataccacaaaagaaccctgggccccagtttctcactttcctctaactggaatgttgcacaactttccttgcccttccctgtccctccaagacacgtcatgctgacaccttgctcccataccccaggcacggtgtagctggggttgctgcagcaacagcacacaaggagtaacatttcccagtgactacagtggctgggatgagtcagttgaacatttcactgggtttttattagtgtatgatgcagtcccatgtcatctacagttcctagcctgtccaagacttacacgggatgatgtggaacactccatgctaatcaccttcaaatattagatggtcaagggttctctcactgaagtcactgcattgctggttccttccacagcaccccttactaatatctacagtaagaggccaaaagtaaaactcaggccccactgctggaacaccatttctactattgcatatcctgtgtgcctaaaaagcaacagtgaccctggctgatgatcaagaagcccctctttttacccagggagttggacaattgttaacatcccagaagacatatttttaacccagttgctgggaagaacatgtgctgaagtataaggatggaatcactgtaattctctatgggaactcatgaaagtggaacttgccgtttaatattgaacgacactgagcacagagttattgatgatttctaatgcgggatttggtttatttttcagacacggagatgacttgattgtgactccatttgctcaggtaagcacagcttggtgaatgggcaggtttctcacagatgtaaaaatttaatttggggaattagttcgggttattaatttaatttaattttaaatcaagcacaagtacaaatacaaattcttggttcattcaagcaattcaaaagcaatgctagagaaagtgactttggctatattaatctgtttcctataaacccatagtaccaaagagtgtctttgcttcaaataataaattagctaagggatatacttaattgggctcatactgacataagcactagaagcagaaggctatatcatggcttaagttatgtttagtataattaggtacatgatcagtgcttgaaattcaatattccaattcaacccaataccttatttatctcttttttacatatgccatttgtgcagagatttagctgagtgatgtgttgatgtttacttcttccttctaggcatacaaatcatgaaaatactttaaccacatgacatatgtgcaagcaggtgataacatgatctaaaatgtttgggaatataaatatgaaagagttgatgaccagatgttctatgtatagaccaatacttctcaaccctacctgcacgttagattaacctagagacctcttatcccagtgcccaggctgcagccctggtcaattaaatccaaaaatttggagatctgttacaagcatctgtatttgttaaaggccttagtatttttctagtgtgcaggagaagttgagagtctctggtatagacaactaagggcggaatgagataaaactgatttaacctggggcatgaagcaggtttaaaaccaacactgatgagtaagaaatgttaaatattaaaatgcaagtaatcctgagaggttgtaaaaattataatcaggcctatatcatacatcaaggtgctcttgcaccttggacaactcacttaaattttctgggtcctcttttttttcaactggtagagttaggggactgagctggatgaaagacagtcagatctagttaaaaccctttcaccgcctcttgccaactcaatggacttgagcgagtcactgaacttttccaagcctggtctcttcctctgttaaataacagttccaagagtacccacctcataagattgctaagacactgaaataataccacgcttataaaatgctaggcacaattgcttgaaaatataatattataaaaactttgtgattggtttaaatgtatagagctgaaaatgttctttcatttctaaaatgtcataagtattattttttaaatggataatagggtttagatagtaggattatgtatagttctactttttaaaactttccaaacttttattactgtaacttagacctataatataatcaattcataagtaacataatgtataatagtaactttttaaattaatgcaggcaattaaaaataaaatacaatcaccatccttttcagatggttaatatcttgtttgctgaaggttttgctggagattatgaattctttctagtacctgtatttctgtgtccaaaaaatttacacttgtatgatttaataatatgatgtgatagcaaaatcttataaagctgagggtttttaattgattactattgaaaacttatggccgggtgcggtggctcgtacctgtaatcccagcactttgggaagctgaggtgggtggatcacctgaggtcaggagttcgagaccagcctggccaacttgatgaaaccctgtctctactaaaaatacaaaaaaattagccaggcatggtgacgggtgcctgtaatcccagctacttgggaggctgaggcaggataattgcttgaacccgggaggtggaggttgcagtgagccaagatcatgccactgcactccagcctgggtgacagagcaagactctgtcaagaaaaaaaaaggaaagaaagaaaacttataattctatatctaagacctcagagagaggtgaacagacaaaatatggcataacaatgtaagtaacatcatcaaacatagaaccaatcattccaatttgagttcattcaagtagctattcttgtttctaaccaaatgatctaggtattattataagaaaaaatatatataaatatttaataacaaatgaaaaaaggtctgtgtatgatatatggtcttttacatcaagtaatatttattaagctgcaacaaatagattagtaaattggacttgaaccctgccatcagtgctcttaaattccaaggaaatctagtcttttacctgattagatattttctgtagtgtacctataatctccaaggaaaaaaaactaatggaatttcaagatattgggaaatacacacatatatgtaatttagtccatgttagtaagctatttaaataaaaaagatgtgtacttaatatacttgaaattagaacttggaatataaatcagctgtataatttataggcatatctgatgcctaaaaataatcccatagtatattaagtctttgcttatgattagctaagtgactcataacaccttgtagagagtggtcattacttgagaggctgccgattttttttaaggggcttcatcatggttttcacaaatggccttttactggagtataagacctggaaagccccactagaattaaaaacaaaacaaaacaaaaaactgttaagccctgaagagtttcaccactcttcatagagcatctgtggggaggggttaagagagaagtcccagtgagtatgtttgagtggccttctcttaaaccctgttggacatgattggcatgttttgctgacccaatcactaacttctcaaattttctttaatacaaagtaaagcacttaccacttaatggtaagtgctattttagcattaactatttaaaactaaaaatataagatacttatgtcacttgaagtgataccaatctaatttgtcctgatataccataattgctttcaccaaaggacagaaaacaatggattttagaaaagtcactcagaaaaatatttagccaagtaggccaaagaattaccctcttttctcagcatgctttgaaaattggaatttcacactaaattccagtgaaaaagctatgcttctcaaaaagacaaaacaaaacaaaaactttttgcataaaagtttagaaaaataataagaaaaagaaaaggaaaattttctaaaattccaaaccccaaaataactgctactgacattttattttatatcccttcagatttatttttctgtgcatattttctgtcccatggctcctaaaaatggccttcccctgtctaaggtgttcaaagatcccctcccaaatccatctcatcttctgcctcttcttgagaactcatttctttatgcctgagtccatctccaaaacacgaatcatggtttccaaatcatggtttcctttgacgtgaaaagagcaaaatcctaaattagaggagaatttaggaagccgtgcaaagatagattgcacttttttggccaggctaaagcctgaaacatcttggatagtaattttcagaaaggatcctatagtatctctccatagtttatcccattgtctaaaacactgtcagggctagaaattcttgctggtgtttaacctaaactcttttccacctctgatttcttatgctttcccctgtaagctcagaatccctttggtcctcagaaaaagtgacagctttaaatatttttcttatttcaattgttaaagtattctcttgtgtttgtgttgaaatcttttggtgtgggtgtttccttagcacgaaggctagagaggaatcccactggagtgcacgcggcaactgacctttttttcttggccagagttcttgggggccaaggagcactaaggaggcacaatgctgataaactgtaggaaactcttctctgctgtcagctgcctccgggctcagtgatcccaggatttgtgacacaactaccctgtagtaaaactctaagttgactagaattttcatgtggaagtgtgtaatgttaaatgaagtagactctgatgaaagaaagagaaaacaggaaaacccaagcattatgctggatccctggagaaaccctcacttcattcagactaaggagatatccctgatttgaaaatacagaggcgggagaataacttgaacccaggaggcagaggttgcagtgagccgagatcgcgccattgcactccatcctgggcaacaagagcaaaactccgtctcaaaaaaaaaaaaacaaaaaaaacaaaaaaaaaaacggggtaggaacaactacatctctttacctttactctaaccaaaatacagcacctgggatacttctaggataaaaatgcagtagttattaatactatagaatattaccatttagttggtaataaaatataaccaatattctcatattcctgcctgtccctcagccacttcacccagcagcaacgatcttgtggcctcatcaccatcctcaagcttgcagactgtgctaggccctccctgccaggctatgaaagaagatagtcacctcgtttcagtcggtgctaaatttttagcttttctttagccttaattaatttaaattacaactactatcttctggacatctaagttctttttaagagcgaaccatataaaattgtctatcaaccttttctggtgtacaaaccagcaatttcatagggtttaaacaaaacataacctggaaagaggttttcttttcataaaaatgacctttctattttgtaaataagcataacttgactccagctttttccggaggtaaaaccgaagtaatgaatctctcccagtgcgggtcgccgcttcctccgccgccagtggcacctcaacctcatggtctgtgttttaccgccatctagtggtaacaagtgtatatggttatgaaaaacaatcctcgaaaccatttattttcctctttttttttaggctatgatgttcagctgtttaagtgttaaatgataaccgtattttcctgctattttcagtgattcttattgtttaataaatgtttagaagcacctaagaagatccgagagtagtgtacgtaaataacattgaatccttccccatgggctaatacatgaaccatctttgtctaaaatttttctgtaaaactaccagtatttccttcctaaggaatatatatttctcatcattcccaatgtaattttgacattgactggctatacttctgcttggtggggcagaagagaaagaaatgaccttaattttctaaccattgagctctgtggaagaaacgtcagggatctttttggttagcaagcattaaggagtaaggacaactgtaaaaggagccttaaagctttgactacagttcttaaagagtcgaattcaggggaagtgagggctgccctgaacaaaagcaaagaacaatggaactttaacttaggggcttcagtaaaactgtttatagttctccccacagcctgcagtaacagatgctccctctttgtgccctgcaatgcaaagtgaaagcttaaaagactaacacagtgataacagtgatgacgacaccaagagtcagtcagcgaggcccaagacaacacccccttataagatttgtctagaaatgttatttacacttctgccaatagcatacatgtcatactgtagaagataatagttaacaccaaacataaaatttataaaatagtttgtcctgctgcaaaagaaaaaaaaacccacacacacacaataaataatctaatactggcatgcctaggaaataatttctctacaagattatttattgcaacagtgtttgtacaaaaacaactttaagatagaaaacctaaaagttgattgctagtggccaggcagctgattgtctgaaggagagaccggaagacagattccttttttcactttttattttgaagtatttcatatatataagggaatatagcttgtaattatgtaaaatataaagaataatactaaaatgaacagtttaagaaatagaacagttatcagtattttaatgtcccctgagtgtccctccccaggttaatctgtttctattgcgtcttttcagaagtaataataattttgatttttatcttaatcattgaaggggagactttttgctttatactcttttgtttaaattctgaagcatgtgaagatataaattatacaaaaatacataaattttaaactaaaaacaaagacaaaataatattaaattagattacttattaaattagaagtttattataatagaggcaaaaactcctctacagaaattttttctttgatgaactaatttttcttttcatgactgatgtttcccttcaaatgatcatagaaaataagttgcctgcatttctatgtctatttacccagctgtcaactgcaatgaacttaactattatgtattggaataaaaatctcagaattctagggttaaaaattttgcctaggaaggggatcaattagctggtgcaatgattttatcttaaagtttccattagtatgtttgatattcacttcttaaaacataaattaagcctgcatgatttaacgacagtggatcatttatccgatttacttctgcatcattcaagatttcatgcctaatgaaagacatcgtggtctgatgtcagcagtcggccatttgaatactccatcataggcagcgtgacctttcagagccgtgggttgtttatatgagataatgagccaggtttttccagtgactgagttaatcacggttggcttcttaggaagcagcattaactcctttaggggaaaattctctaagtcactgtcccaaggcgtacacagctctccattgacttacacaaatgaatgtcaatttcataaacagcaacaacaaaacagagtctgggacatttttgtcttagaaaaaaaattagactgattttagtctaggtctgtgccagatgaaacatttctgaaaacaactctggaaactttgaagcaattaaaactttggagactcttgaattaccaatgctaggcattaagtaaatttcccaagtgcatgccaagtcattaagtcaaaggtaacgctgccatcatgggctaatattggctgaatgctttctatttgccaggcactgttcttggcaccaaacctgtcattccatatactcctcacaacaattctacgaggtaggtatcactatcccagttttccaggttaggaagctgaggtacaaagaggttgcatatctagtccaagttcacacatttactacataacagagccagacagtctgggttgttaggtaatacctactcagacatttggaatctgtgttttacataaacttagcactctagctgtcacccaaatcacctataatcccatctaatatgggtttgaccctggggaaacttgcccatttcaggagaaagagaggagggaagaaggagataaggctctaggaaccttctcctaggctcacttccagtccgttggctactttctagttccaactggaattagaaaaagcgactgttagagatagtgacacctattggtcctgccttgttatgtgtgtgggcatgttgtgtctatgtattcatttagtcaacaaatttttattgagtatcttctgtgtgccaagcattgtgcatgtacagggcgtagcattttacataagaaacgcatccctgagagcttcttacaatgcacaattcagataaccttaacaaaagaaaacaatgtctgcttactagctagagtagccatgtggcaaaggtagaaaaacagtttaaaattcacttcacttgccaacttattattatgagattcttcatcaatttttgaagagatttgggagtagggaattttttatccctaaagtgagctttattagcattttatattatactatttgaaatgtgcaaaaatgcaatcatgttatctgtgtattgcctggaatattgtcttggtgactaaggaacccagaaatactgtggaaactgctgctactgtcaccatgtgcatagacaatgtggagggatttctggaaaatttctgcagtctggcctctctggatttcgtgtggatacctacaaactgcactaagtgttgggagattctttagtggtatatgaaactaagttgcaagcaatatcaagttttctcttaacaaaccattttcaagtgtatttaaaatggccttagctcaagaagtttcaagaatcctttcttgttgtaggtcttggccagtctgcgaactgtacgaaacaactttgctgcattaactaatttgcaagatcgagcacctagcaagtaagatatccttttttcccccctcttttttgctgaacttttaaataagttttctcaacttgattgagcccaaggcaatatgttagacttctctgtgttgttgccatgttgtctgtgtatactaagtcatatgatgtcctgttaattttctataaatacttcgtggtgatggttctaatatcagaaatgaagcagtatgacaaataaatatggtgattccatctgtcagaaatcacctggcatgatcagtcctccgcccagttatttacactcagggtaactttatagtttcggcttacttcataaattaaccgtgggtgaataatctcatcacaccttaagatcagctgaaagtcatcctctcaagacaacgatgatttggagaagcgccatatcatagcaaagatctttgattctcctgctgttactgactttcagatcagcagcattcatggagcaattaatagaattgtggtttatatgacaacagggaaagcatttgaaagatgggaaaggattatcatttcaggttcttgataaaggcaaaaaaatctaaaaagataaaagtaatttttcaatattaaatggaaaactggtttgctgttatttcaatgtccatttttttaaaaaaaatctgctattaatatgaaataaaatattaaaatgccaacttcaaataattttccagaaggaaaaaaaacatttaaatcatattaagaggatagtaaatataagtgtattaggaactataacttacctaagtgcataacatttcatagtagttactacttcttaaaaacaatgagaaatctgaactttacatttcatagtaataaaattgacctcccagattcacgtttttcattatcaaaaatagctctggccgttattcaagtacttcttgtgatagaaaaaagtttttaaaaatcaatataaatgtaacaatgcaagctattggaatggaacccattaggttctgtttttccaggtaatgaatttttgcagtcctattctctcagcctgaatacttctcatcttcttcttcctctcctcatctactgggataattgtcattcattcttttggttgcagcttaaataaaatttctcttggagcattgtccctgatgatacccaacatagacacacacccacaagccctaatcaaagtgatgtgcctttccatctctgtctgattgtaccttgtacttgattcctatgttagcacgtagctctctgtgctcctgttgcctgtttgtctgttgggatgctcctgaacactgtcagttcccagtgagtaggaatgtagtcggttcacatttgtattccctgtgcctagcataatgcagagtctatcagtctgcaaaggcctgttcgctgaaagggcaaagtagtaactcagcatgtaaaatctgagggcatgctttgaggtacctgttcattaccaatcacgttttctatgtaacgtggccgtgcaatgtcatactgacctcagcggcccccttgggctttggggatttggtagcttgtaaggtcaatcacctcccccttagaaagtctcagctctgcagaagaaatgaagttaactggttgtcactcccaaactttttagtctcgaattttacccaggaaactgagatttttgtctttaaaaagtgaacaagaaactccctttatgcttcctttacatgtggtcacctgggtaccagcatttaaatctgtggcaggtaaatagttgatcagtcaggctccagagacgatctgaggcctgtttctatgcaagacagaagttttcagctgacatacagggatggaacagattgaaatggaaaggaggagctagaagaaaacagaaaatcatagcttgagcctgaacttcctctctgccttgtcaatgcccagggtgacatctaaccaaacagtattatctggcagactctaagtaaaggccactgtggtcttccttttggtcaatgcaaatttgtgcctccattactgattcaaaccaaatcggcttctttgggtatcagaatagtaggattcaatctattcacggctaaactcgattctgttcagtgagaacaaagtgctgtaactctgcctcatcacatgatgaccctgggagaatcagaacctttcctgctgggcactcacagagccactagaacatttccaagctcatccttggattttatggaaggcatgtgctcctttgcacaagccaccctttttatttgctgcagaaaaggagtctaggaagaatgcattccaaacccagcccctgggtgggtattcagatgcacattgctgacttgttaacacattactgcttcttgtcaccttgggttttttgtttttgttttgcccttgagattttttattccagaagtgagttctggctcatctgtcattagaggaggtatcgaggcaaccatggatcaaagtattaatattttctgcttgccattacttgttcagatatcaagttcctgagtaccagttaattgtaggattgatagtaaaaggagataattagaattgagtcaaccatttggttttccaaaactgtagaagagtgtgaaaatatttatttaataccattcccagacaaaatcaatggtttctaaattttcacagagcaaggactaaaaaggagtaatcaggatatcaattatttgaatgataaactcttagccagaaggtaacagataacaccctgttacacacagcaagaccccatctctaaaaaaaaaaaaattaattagccaagcatggtggcatgcacctgtagtcccagctacttgagaggctgaggtggtggggggaatcactagagctcaggagttctaggctgtagtgagctatgatcacaccactgcactccagcctgagcaacagagtgagaccctatctcaaaactttaaaaaaaaaaaaatttaagaagaagaagataattactggtatatagaccagagctatttcagagcagctgcttaaaatattaatattttggtttatcgagtttaaattctccccatttttcccccaaccattttattttataactaaaaaaaactaaaataattcagaagtaaaatttggtgcattttcaatcaaacacaaaattttaatcccaaatcgataccaataaccttaggagcaatgaaagggagccagaggctgagtggaaccagtgagaatttacaaaatcccaggctgctttccccaactttcccccaccctgctaagaaattcatcatctcagcaaggcatatttgaagagattgatgccattggcacatatgtgaggctgtgcatgcaggttccacaaaaacatctcaaactaaggcagcaaagcagagcatagaccctaggatcacattcgtttagttcaaatctcagcttcgttacttaaaacaagttcttcaaattctcaaagttttgtttttctcattggtaaaatgagaacaatgaaacttacttccttaaggcttattgtaaggattcaatgagataattcatttaaagtacttatttagcaatgtctgatccacaagaagtgtttattaagtgttcacccttggtagaggcaatatatatataattattatatacctaatatatatatatatatatatatatatatcagacatctttgaatgtatctaaaagtgttttttaatcattatattttaaaagctgtcagttacaagtaataactttataaagttatatttcaaaaatgttgatggatactttataaatgatattcttttcaacataatttattaagcactgacggaatactggatgcattgtgctaggctctgtagggaatataagttaatcagacagcatgctttttttttttacttcaaggggtttatagtcattttgtggaacttggcaaacatctgaaaacttagagaacacaagatataatttatttaagtacctttggcttagagtatttctaaagcttctatagtatctatttggacaagtcattaatatacctctctaacaaatatatcagaggtgtttttcaatataagaaaagaaaggaaaaagttcaaatagcttctctaattataagatagtttacaacaaatcattcacttctgataatgtacaggcaatcacgagaatttaggccaacaataaaaatttcttaaccctgtattagggaagacaattataaattgactgctttttcaaattcagagtctataagctctggcttcagcgaataaagtctgtaagaatttcctcttctctcatgtcccagtgacacttacatcagctttatttaccccaaatcaatcactgtgagatttaccagttttctttttggacatgtgtgatctgagccataatacaaagaacgcctagggacttgtctggctagtctgaaagaaatcatttgcgtgtccaaacttaaaaataattctttaaagtaaaatgctatatctgaaatgactcagagagtgatcaaatcaataagccccacatatttactgctttgtgtttttctgtctttgtcagaagatcacccatgtgcaaccaaccatccatcaacaaagccaccataacaggtaagaaagatctggagcttattcttcatgtgtctaggaagaaaccatttctgccaagagtcaatataacaccaacaccaatttcatgctgcaatttgaaaatgttaaagaaattctttcttctctacattatcatttctatcattgatctcacaaattgtctaagctgttatttggaacatttttaccgatttacgttttttactgatgtacattatttttaaccatttaactatgtgcttatactcatttgagcattgctctgggcatttgtattttgagagatgatgttactttcaagtcacttcccattctggttccacacatgtgttattagcatgatataatatgtcatcatttagtttaataagagtgaaggcataaataaaaggagtaacgtgttggttcatcaatatcccacttgtgtgtaggaagcaacattgtaccagtagtccaataaaggactgagagagctgagaataaactcagtttgggaggggagagaagttaatatacaatgcagaaaaagttcaatgagatcaaaacgttgggatctatagatgtttgggaaagaaaaataggaggaaagatgagaggagccaagtgcataaaaataaaattatctcaattcctattagtctgttttaggcacaggacttgaccccagctgaaccaaaaacagaatgcatgatctcattttgctgaacctgaaaccaaattgaactcttttgactatttcttgaaaccccaattgattcattaaaataattgcctggaaaagaaaacctatgttttctaaaattattaccagaagaaaattagcatattctccaaactaaaacaattcgtcattggattcaagtgtcttccttgagctccaacccataatgtgctgaggagctcttattaagttattagtgagtacactttgcttgaaatttaactttatcatgtccagacgtctgtctgtgtttgtggtcaccacattagagttgattctggaatcattgttaatgtcatcttttctgaatgtcatcaagtgaaacttgtatttcaatgaatgttaaattattgatctcttcttcatgtttctctttcaacatattattggtgatgacttccaattatcattttatagtacatatatggttaaccagttttgttcttgatattgatcaagagatgaacaatagggccaggagtggtggctcacgcttgtaatctcagcactttgggaggccaaggtgggtggatcacttgaggccaggagttcaagaccagcctggccaacatggcgaaaccccatctctactaaaaatacaaaacttagcatggtggcgagcacctgtaatccaagctactcgggaatctgaggcaggagaatcgcttgaacccaggaggcagaggttgcagtgagccgagatcgcgccactgcactccagcctgggcaacagagtaagactgtctccaaaaaataaagagaaagagagatgaacaataacaattcctatatgctaaaataaatactttgagtaactgatttcttctgccaaaattcaaattcaacataaatgagtctaaactgagttggaggtgtggaaccggatccctctgtttctatgcactttcctaagttgaggaatggacaggcctacatttatgaacctgtacctgaggcctctagtgagagaagccacatggaagctggtcttcacgctgctccaggcactaaatctgacccctatcaagaggaactaccctcaacccccaattttgcaataagcaagaactgacattgctatttgggcagaatgcagtgctattttggtccctggaagcttttttagcttgaggtcacatatgagctggcctcacaggtggagcagcattctcccagaagagcagcatcaggtaccagtggaaattgttgtggctgacaacagatggttgggtgctcagtggtcagggcagctgcccagccatcccagcagatgccaggcacagattaacaggagagagtagctacactcaaagggcacacacttgatcttaagcatatgtgacagacctcatagaagctcctagaaatgtatacatagtaagggggtcctggagcaataccagagggaattatgagccacagaaattaagaaattaaggtgaatatggcctcattcgtacccacaagctcctgacctgaggcctagggacaagggggacacagaaataccttatctagaaagggaaactaattaactgttgttaccacttagtgctgctgggctcctcacaaagcacaacaggaaatgaactgactaaaactgggaagtcgtttttcttgcccaagcatagcaaaccaaggtgggaacatggcatagggatggagggatgagggcagtagcaggggaaggttcccctttctgagcccattttgaaaaagtgggcccttaaaacctcagtgctagtaataataatgatggttgagattttgacattagtaagatttgagacactcagaaaaggcagtgcttgtgcctttcctccctctgcagctgaccactcaggccccaccctctaggctcactccccctgaagttggaacctggctgtactgtggcagtagtcctgggaagggcaaagaagtattaaaaagagtcagtgaggcacccttaagatgaatgggtccctgttgataggggtcagacctagtgcctggagcagcatgaggaccagcttccatgtggcttctctcactagaggccccaggtacaggttcgcaaatgtatgcctgtctatccctcaacataggaataaggtctagagtaacagtgtagcctaacagttaagttcatggctgatccaaaaggctgctagagcacacagctccaagtgcctccggagggcaactccacagaacatcacaacatggtgcccctagaattataccacgtggttgctctgcctacccagcactcaaatcatgctctatcatgagagctttgtggccctgggcaggttgcataccctttctctgctcagtttccctacctataaaatagtgacactgcttcctgcagttgttgctggcttgaatgagtgaacacgcatgatgcccttagcatagtgcctcacagaaccagcacttaatacatctttttaaattccattttgttgttattacttggttttgtttctagggcccactgtatacatagaactaggggtttcttcatcaattcaggctgccataacaaagtaccatagactgggtggcttatagacaacacaaatttatttctcacaattctggaggctggaagtctgagatcaggatgccagcatggttggggtctggtgagagtcttcttctaggttgcatcagtgccctttgtaaaggcactagtctcatttgtgagtgttgagtgctccaccctcacgacctaatcacctcccacaggcccggcctccaaataccaacacatattgggttaggatattgaaatgaattttaggggcacacaagcactcattccgtaacaagggggtaatggaaagaataggacaaagacacaaacgaaggaaagggaacagtgagagaaaggcaagcttgcaagatcatgagaggaaaacttgtgggtccttaaattggccaaaatggatgcgcttgctttgtgcccatcaaaatggggtctcctcctgctcccagcactgtctcctttattctcatcacaattcacagacgctggtagctttgtgatagagatgatacactgttgttcaggatgaatttctaagtctaagaactcacttttgagtcatagttgtttgaaggagaaatattaattctctatcacttttctgtaaaccaactctaatttttaaaaaagaagagttaagaacttcagcagtctacatatcacataccatgctttctaaggagttgtcacatagaatttacaataccctcttcctcttttcaaggttattgcatttgacatgtattaaagccaggagaatttgatttttttttttttttcttgagatagagttttgctcttatcgcccaggctggagtgcagtggcgcgatctgaggctcactgcaacctccgcctcctgggttcaagcaattctcctgcctcagcctcccaagtagctgggattacagatgcccaccaccacgcccggctaactttttgtgtttttagtagagacagggtttcactgtgttagccaggatggtcttgaactcctgacctcaggtgatccacccaccttggcctcccaaaatgctgggattacaggcatgagccaccacacctggccgagagtttgattttatagcattagggttttaaagctaggttttaaaggtaggtcactggccagtttttatttcaatatatagtaggtaaacatacaggtctaaaatgatctaacaattccttaaaagtaaggctttgaagtttgcatttataaaagagacttaaatagctcttttgctctttagtgtgatatgacaaagatgatgtgtggcatttggagcctgaatgtgaacccagtctctcctttttgcttcatttcctcattttggagatttgagtacctaacacttaggactgttgcaagaattcaaggagataagttatataaaaggatagagttcaagttgggcatggtggcacacccctataatcccggatattcaggagaccaaggtgggaggactgcttgagatcaggaattcaagaccagcctgggcaatgtaatgagacctgtctcataaagtaaaaaaaaaaaaaaaaaaaaaaaaatggagccgggcatggtggctcatgcctgtaatcccagcactttgggagcccaaggcgggtggatcaccaggtcaggagttcaagaccagcctggccaagatggtgaaaccccgtctctattaaaatacaaaaattagccaggcgtggtggcaggtgcctgtaatcccagctactcgggaggctgagacaggaaatcgcttgaactctgagggcggaggttgcagtgagccgagatcaggccactgctcttcggcctgggtgacagagtgagacaccgtctcaaaaaaaaaaaaaaaaaaaaaaaaaaaagaaagaaaaatggatagagttccgaatgtgatgaggaactcaccaagtgtttcttcctataaccctgtcccaatgcctgacatttttttgttcctaaagctaatttaaaaactggtagaatagaggtaacagagaatattggtatgtcagcttctttggtacatttcatttatgattttgttttcacacagtcatggcatgacatttttagtaatccttttatcatttagagtaaggctcacctacatacgtccttaatgtgtggtgcacaccagaagtaaagagtgcattggaacatgagagggtggcaaagagtcagagatgcccaagccatacctgcactgggacagtgatcccatttttgaagtacagccatgtagcttggagcacagtccttccttgtaagcatttcattttcgaacaaccttagctcaaggcaagcattctgcagccatctcattaaatgttacatcttcacaataccattttcaatgcttctgaatttccatatttccaatatgtttatttaatcatcctcaattagaggattttcatgcaaggacacaactctaaagaaaacgtatttaaatatctttattttaaagatgaaaaaactgagacctagtgagagagggtgctgcttagtgacaatgccaggaataaacatgtggttcctttttcgagtccatggtccttcttacacctttataaagtaaaataaaccattagattcgggtggcctttatacccaccgtggaagtatatgctttagagaaagtaaatgaagtattaatactaactcctgagtaatagatgtggcattgtattatttgtatatgagcttgaaaatttctcatcccaacctctcactggacatatctctgtagttatagctattttgattatatctactgcttataccccagaggcatagagaccagcaccctaaagcaaaagacttctggattttgactttggaaaatacaaattcttctacaggagcggtgaaactagtacagctgcctgctctttacctgtagggggagacacatgatgcagtgacaagcatagaacagcacagaagtggttttagtccagaaaataaataaataagtaaattggtctaagtcttcattcctttttgtatttttttaccctgaagattcatggcttcattaaaaacagtaagtgcattctaaatagaatttagtcaattggcacgtagaaaattaaaaagtaaactatccaaataatgctagtctgtcaaaacacaatgagaagaaatttaatcttatatgtttgttgttctaaagcacaagcagtttctaagaattaataagggggaaaaacaataatgatatttaattgggacaattatttttttgttatctgggctaatcacttaatgctttgagcttatcgaatgaaagaaactaagcaactatttcatggtgacaataaggatgctggctacttacttagatctgccttttaaatctgtgtgtgtgtgataaaagcaagtagtatatatagttttttaaaaagaaatatagagagatctaatagatgggagcaagaaccatataaagaaggcaaaagggatctacatgagagaaatatgtaagtcctcaggagatactgaagtaaaacatgtgttgtgtcagtgtatagggaagacaagagacccagccattgccagagaagccctacttcctcatcaaccaccagcaggcagcagcttcatgctgtagttctttttttcctttaatagaataaagattgtggccacactttaataattgccagaaatatgtgttcattaagctttttaagaaatgtgatcgaaaaatgctgatgatacattgtgtttaatagctttaataaaaaactgataaagcatctaatacatctaatgactgtcggatttcctaaatcttttaagctgaaggagtttacttttacaaaaatcctcattgaaaaagaatcttccggtaaaaacattgaactgaaagatttgcataaatgcatggagtattactatttattagttaaacttatgatcttttagagcagtaaaagtcagttctctttcttacaaatgaatttgttttggccttttatgcttttatttaatgagtagagccatacctattaatatataaaaagatcagatctgacaccgtggctttttgaccaggaattgattgaagttagacttgttttaagaatagtgaaaacaagggctatgtcctaattatgaggggaaataatttaattgtgtctctcttgtctgaatatctgatttggatgctttgttataactttaattgaaataattaaatggggctcatgttcatttagcctagcaaaaaggtgatgagctagcatatatgttaaaaacccagctttcctcttagtagttgtctaattttggtcaatgtacttaaattctccaagttttgggggtattctttatcagtaaattctaattcagtgcttaacatagtacttggtactcagaatgtattcaacaaatgttacttatcattattgctataatattattattattattatctgcttggtcaacagtattttccatgcaccttatatatggcatgcatacgctctggaggtaaaatgtgactactggttcaagaaatttacaaagtaagggagaaggaattataaatagttaagtactagctaaatgccatgattgaagcctttatattttttattttaattaattaattaatttttagaaatagggcctcactctgttgcccaggctggagtgaagtggtacgatcttgtctcattgcaacctccgcctcccagtctccagcaatcctcccacctcagcctcctgagtagctgggactacaggcatgcaccaccacgtgtgcataattttttattttattttttgtattttttgtagaggcggcgttttgccgtgttgcccaggctgatctggaactcctaggctcaagcaatctgcccaccttggcctcccaaagtgctgggattataggcatgagccacagagcctggactgaaacctctttaaatatatatatttatataaatatatattatatatatatatacaaaatatataatatataatatattatatattatatattttataaaattatatatatttcttatataaatatatatttcttataaattgtataaatatatatttattatatattatatacatatttattatatatttattatatattatatacatatttattatatatgtattatatattatatacatatattatataaatatatataatattatatatttattatataaatatataatatataaatataattctcatataaataaatataactatttattatataatgtatttctcatatatatgcttattatataataaatatatttctcatataaatatatatgtttattataaaataaatatataaaatatatattaaataattatattatatatttaatatataatatatatgaatatgtattcatatatagagagagagagagccagtggctctacctaggaaatgctccctgataaatttgaagaacataatgctttccatgtggttaggggaggattgaggattacctcacaacaaaagaccagcaagaataaggtatggaagcatggaatgcctgtccatatcaggggactgggaacagtaaaggacaaattgagttaaaggtgtataggagcaactgaacaggatgctccagaggtagattaaggaaataatatttgaggcctacataaataacagtggactttattttatggacagtggaaaatcattgagcatttccaatcgtaggaacaaatacacatttcagaatgacagtaattggaagcagtgtagaaagagattgaaaagaagaaagactaggggcagccccatactcttcagggggctgtcacaggccttgtacaggatcaagataatgcagctctgaactggggtggaagtggggctgtggagatgagggaatgggttcacaactcttcagagataggattgaagggacttgggggttgattagagcagagactgaggatgaacaattttaaagtgaaagtatgagccaggtgtggtggctcacgcctgtaatcccagcagtttgggaggctgaggcgggtggatcacctgaggtcaggagttcaagaccagcctggccaacatggtgaaaccccatctctactaaaaatacaaaaattagccaggcgtggtggcacgtgcttgtaatcccagctactctggaggctgaggcaggagaattgcttgaacccaggaggcagaggttacagtgagccgagatggcaccattgcactctagcctgggcaacaagagagaaacttcatctcaaaaaaaaaaaaaaaaagtgaaagtatatatacacatgttcattacagcactgtgaatgtgcataaagggttaaaaacaatccaaattctaaataatgtgtgaattctatttaggtaggggttaaaaaattcccataataaaatgattttaaataatttatttttgagaaaattttaataatatggaaaaatgtttgtattttaaggaatacataataaagtgccatgtgggcaataggcacacatttaatgcactttaattatgtatattgaattgaacttaagttacttttagttgttgaccagtagttagcaaaggtagataggtttaccattttacattgaatctagtgacaaacatgttatttctcaggtcccagttgttagtttgcctctccttgcctagaaagggcactggtgagacccgccctaacaatatttcaatattatggttccacagtccagcattaactgtattttaaaataataatatctctcacatagggcagcattttatggattattgagcctatgacaaaaatgttgtattatccttcagatgatcagaaaaactacccttagggctgggtgcagtggctcacacctgtaattccagcactttgggaggcaagggaggaagatggcttgaggccaggagtttgaggcaagcctgaaacacagtgagacctccatctctacaaaaaattttaaaaattagctagacatggtggtgcacacctgtaatcccagctattcaggaggatcatttatgcccaggaagttgatgctgcagtgaaccatgatcatgccactgcactctagcctgggctacagagcaaaactctgtctcagagtaagaaaagctaccacatgaataaaagatctcagtgtcaccaaagtccactcctgccagcatcccttccccgctgccctgagtttaaaaagagcaatacttcccaaacctgtctctgatcaaaggaatccccaagggcttcctgagaacaaccacaaaatgactgattcccagactttccagaactgaatgtctaggataaggctcaggatctaaattattaacaaatactcccaggtgaatgggcttgattggccaaatttgggagaataatggaatactgaagaaagcaggtgagagggctgcctgtgtacagtgttgtcattgagttgatgatagcttgttggaaaatacctgtctttctggaaagtatatatagtgacacccacaccctcatctaacaaacagtgcagcccaggataagcacgatcatatgtgcaaagtgctccacgattagtgaaagaagatacaaggtgatattattatctgtgctgacttcgtcatcctgggcatcagcgtcagggtcatcatctgttatctctcaaaatacatacaagattttaagtagagcagcttgctcgtctctgagaagaaaatcaagtatcacatctacctttgtggatgtgggagggagggaatttgggaaatgtttagtaattgcattctttttgtcttcttggacacagtaccaagtctccttaaactaataaaagaaaaaaaaaaaataaaagaaccacacaaactgcattcttcagtcactccctttctccacaaagtgcttcccacccatttcagccttaaaaaatattctaggcatactcagaaatacagtgactgtggtggggcaaaatgttgaaaattcctttgaggctcatttcccaaattttactagttggatgttacactgaattatttaactctaaataaatagggagtgcactcacagcgtcgtttcttttgttatatcaaaaagcctctctcaaaaaatgctttaaaaatcagttggatatattattaatactaatattaataaaagttaacatttactgacatttgaaatgtaccaaacactctagatgagtaatctttttaaaccttatgatatccaaagaggtagacaccgttgctattcctgcttcatagatgcaaaactgggctagacaagttgaataatttgattaagatacataggtagaaaattacaaagtacggattgactcagagggagaatgtcaagtcctctcctaaaatgtactggcatgtacacacatacacaagctgctggatgtgctggtcctcaaaagttattccctagggacatctctcttcttttttttctctctccttccctccctctctctctctctttctttttcttttttcttttgagaacagaaaacaaatctataccatctattcctgaatgtatatgagtggagggtaggacaagaggagggatmagatctgtggatgcacagaaactctttgggaaaccctaaaaactctctatagttatataagctaaggaaaggattcctgccagggggtataggattcttcaattcccacacttctcttcctgactcttctgaagtgcccgttgtcaccagagtgcccaggggcagagcattgacaaggaaaggcccaggtgtgtgtgagaagtcaggcagatggggtgtttcggaggaaccagggtaacgcagtgcttcagcgttagcactcaccttgcttctgggaccacttaccacgaaggcctgaaagggcaggccccaactactgggaatattaatcttctctttgggtgaagtctcttcatgccattatcatctcttagctaccattgctaggcaaaagtttcctagctcaccatgtcctgaatgcacttccttgagatatttctgatgcttaaatatccagtgctttctagtgtgccgtcttccttctgtatttttgttttgttttgttttgtttttttgtggttccttttcagcactgttggtcctgtggaagtatttctaattgactgtattctatatgccacacaaaacagatgggtgtttatgacattcttttctggatatgtttctgatgtttgcatattgaacacagaactgtccacatagagaacttgatttctgcctcttcctggctttgcttttactcatttagtccctagtatgtgaaaggctatgcttaggctccaaggacccaaggatgaataaaatacctccagtaagcttcaggaccattactctagaggtttgtggaacttaaaaagctaaaatgtgttctgttgaatgacaaaaagcattaagttaatagaaaacagagggcttataagtgaatggataaatgaataagtaaaataaagaagagagaaaggaagggagagaggaagaatggagcagatgcaggtgagattgtttttctaaagagctaagaagctgcctacagtgttagcttagagactgaaaatggtttgggaaaataattcagaaatttagggaatacttcacagcatgagaaagtggagggctgagattggtaaaagaagacatgtttcaaaatagccaaaaggaaaatagaaaagaactggtcgtgaaaccgagacctcagagttgaatgacaagtaagatacctctgaagtcactgacagtggactgactgttatttgactaatattgcttctacagagacagacctaggttttatcctcccatagaaaaaaatctcaaacattggtaggttttgtttttgtgttttgacatacaagtcaaaatctatgtgaaggaggaggaacaagactcaggggtcagaaaattggggtttcgtggctggctgtcctgctcacccactttacgtgtgaccttagaaaagtcacgccgatgtgttagatcttttctgttaaaatgtggtgggtaataattataccttcctaattttgaggaattacatgagataatctgtgtaaaaaaattagcacggtgtctgggacatagtaaatgtcaggtcttatttaaaagcatgtggaaagtgcttaatatgttgaaaagtattataaactaccaataaatattattatattattcaattactgttgatcctcaaaacagccatctctggaaactgtgcaattatttgagccctgatgccattgctgaaagcattttggaagtggctttagagaccatttacagaccatataagacacacacataccaaaaagcaataagcaatctcactggtttatagtaacacttcacttatgaccaaaaatattatttccaatatgattaccaaccctattcaccagacagaatgtcaaattagcttagatggggctaactccagaaatgaaaccattctcaagggattttaaagagttttttaagaagtatcacatggacttttaaggcaattccaagacagggagccctaaaatcattacaatgatggcaatgtgtggaataagcatataaacacattttcccagatgcaactttgaaggagacaaaatctgaattctaggcagtttgtgaaggaaaaggagcaatttctgggaaatttcttttacccctcagccaacctcaagacagtctgtctttctacagaccctcccttgctgtttctctttactggaaactgttgagggtactggaaataaaggagaaggccaatgtatctaagaccagtggatcagagaggagcccaagaaccttcatcatttccacagaaagggcagcagaggaaattaacctggccttttgtcatgctattatttctcagtgagtctattaaattattgtggcacactaaacagtgttgtctgcatcttgttctttggggattccatacaattctccccttggctggcttatcacctccccttagaaaatggtgtctcagcaatgatcctttgcttgcaatacaaaaaaaccaactctgctcattaatgcaaaattcttagtggaagaatataggaagaattctgaattccctgagaattagtggggcgacaggtggtggtgggggtgctggaggacgaggtttgaaggaatcagtgcatctttacagtgctagaaggctacaaatcaaggggaaagtctcatggcaggagtagtcgagtgagatccccacaactgttcttagtttctttgtcattatttcaagagtcaaacagcagtgaagggatctaatttgtcttgtttgcgtcctgggccttggctaaaagagaacaggcaggtggcttcagttctaccaaactatgttataaaatgtggtagtaagagctgaatgatgggaccagattttgtgggttcatattctagcactacgacttacagatgcttgtgctcaaacaattcatttaaccttccagagcctgaaattcctcacttttgaagtaagcacaataataatatttatctcatagggagttcatgaaaattatttgaggagatatttatgaaaggctgggcatggtttgctcacgcctgtaattccagcatttkgggaggctgaggcgggcagatcacctgaggtcaggagtttgagaccagcctggccaacatggtgaaaccctgtctctactaaaaacacaaaaaaattagccagacatggtgttgcacacctgtaatcccagctccttgggaggctgaggtaggagaatcacttgaacctgggaggcagaggttgcagtaagctgagatcgtgccactgcactccagcctggataacagaggaagactctgtcttaggaaaaaaaaagatatttatgaaaaatgaagcaaaatgcatggctcacagtaagcacttgatcattgctggttaactattattaagattatctaatagggatacaaagtatattcctgaaagaaattagggtgctcttagataggggaaataaatgctagtaggattggtttcaatgcactatttattttattaatttatttctcactgaatttctttttatgatactcattttttttagagatccagatggtacctgtcattaatgtatccctgagaactcagttcctctgaaggcacaaaaataatttgaccatctcatcatttgatccacacacatttattgatgcctcttttatgcttggttctatacaagacgccgtgacgtgtggcccctgtaggaagtcctggcctctgtctctaaatctgtcatctcagcccaacccctattcagattatctgtgccctctgcgtagccattcacttcgcctgggtgcaatcatgccttccttacccaacgtttaacaagtccagcctagcaacctacatcatgccatccaacagaaggaaggcattattgactcagaacaaagtataggcgctcttagaataagtttattaaatcatttttttaaaaaaaagatatgtgctttttcccaggggagcagtgaggcattgtcagagggtggattcattaaatcaatacagagaatcctggctgcactatttgttagctatttgactttgggaaagttattctctgagccttgatttctcattagaagacgggaataatagcaaacctatctcagagcattaagtaagaattaaatgaagtgaattaagcacgaaacctagcatctgacgcatagtaggaactaaaaaagaaatactagttcttgaataaacatttttttcttgactgtactgtgatacttccatcagtgagtttccaaggcaaatgaatcatctttagaattggaagctcaatgtaagcaacaatgaagtaaagaaaacaactgaatttctcttgaaattattttcctttactgacttgtctttattgtctgtgttcacaagaaactagctctgactgcaaaaatgtctgcctgtttctatggccagttcttttctacatgtttaaattcctaattgtgcacacaatcttagtcacaatattttcatgtgcaagcaattaagactcatttaacagccctccctctggaaggttttgttctccatctgccacaaatcagattccttaggaagatatttgattttgaaacaatgttaaagtactgttcattttgttcaaatttcatttatgtaccattttttaaagtgatgtaaatggacagccacaaaaagctcagcagctggtcaaaacaaaacatcaaagtcaccattgaaatggggcaaaaaaattaaaaactaatatgctgggacaatgccaaataaaaacgatagtctgataaacattcctcagacacattttgctcataacaactatttcctttacagcagatttaaaatatgggaaaataggaatataccccagttgccactctgaatcttagctgtcctgagttcactgcaatgtatataataaggaagtcagaaggtggaaaagaggaaaagattaaatttgtaagttttttgaaagatatatggtaaaaagtagaggtatccaacagatttgtacgatagattgttcatttaaggaccaggagcggtggctcacgcctgttatccagcattttgggaggccaaggaggggcggatcacctgaggtcaggagttcgagaccagcctggccaacatggagaaaccccgtctctattaaaaatacaaaattagccaggcgtggtggcacatgcctgtaatcccggctactcgggagactgaggcaggagaatcgcttgaacctgggaggcagaggttgtggtgagctgagatcgcgccattgcacttcagcctaggcaaaaagtgaaactgtctcaaaaaaaaaaaaaaaaagattgttcatttaaaaatcaattcgattggccaggcacggtggctcacacctgtaatcccacagcactttgggtggccgaggcaggcggatcgattgaggccaggagttcaagatcagcctgggcaacatggtgaaacccccgtctctactgaaaaaaaaaaaaaaaagtagccaggcatggaggcatggtggcacatgcctgtaatcccagctacttgggaagctgaggcacgaaaatggcttgaacccgggaggcagaggtgagatcatgccactgtactccaacctgggtgacagagcaagactctgcctcgaagaaaaaaaaaaaatcaattagataagtgagagtgtatattcagggcaacttaaatctatgctctcagattaaaaataagatttaattacaattttttttttttttgatgcagggtctcactttttgctcaggctagattgcggtggcacaatcacagctcactgcagcctcgacctcctgggctcaagcaatcctcccacctcatcctcctgtctacctgggactacaggcacatagcactgcaccaccatacctggctaatttttaatttttttttttttttttagagacaggatctcacgatgttgcccaggctagtcttgcactcctgggctcaagtgattctcctgccttggcctcccaaagtgctgggattacaggtgtgggccatcacacccagccaattttgaagtatttaatttttaaaatgaaaaattgattagataatagttctccctcactacaggtgaagtctgtttttatttatttgttcaatgggcttctttagaacatgacatagaaggcaatccttggtcaaattaaggcagaaacaagaatttattaggttctgaacataaataactgtctgtgaactggtaactctctaattaagcataaatgtgaaaagaagaggattagctcttcttgaggagttggaaatggaaaatattacaatttggagaggtagcttgcagaaaccgtacagttttctctgcttatatgccccagcgttgggagacttgaaaggaatcaccaaccaagttaatgcaataaatttccatatatagatcaattggatgttttgtccccagcttcctaggcctttaataaactgaattgttttggtatcactggatgaaaggttctgtaaaagttcaaagtattgttatttggggcattcacacctgcatgtttaaaatgcctttgtgcagaatgtagtccaatctgctttcaaatcagaccttcaaagaagggtagattcatccatgtgacagatccccttaggtgcttctctaaaagaaaaagttaagctagcaggtctacccccactcattatctttgtctctttgtgcgtaatcatcaaaccgcacctctgaaaagaagaccaagagaaaactttagtatctctttgctggagatgcaaagcaagatatagaaggaactggaaaatagttcttaagtaaatacagggggaaaacggaaattgagaggacgtacttttcgctaacagttgtaaactaaaaataaaatttgaagcacgcctgcaccctcacctgaatggacttcctccttggccagggcactttaaaatttaacctgaaagactgatttaggccgcaaaggaagtcagacatgccttattttacccctccagtattaacatcaccacagaccttaagtctgataagaaacatttaggatctcttttcttggaagcctgctacctggaggcttcatctgcctaataaacctttggtctccacaacttttatcttaacccagacattcctttctactgataataactctttcaaccaattgctaatcagaatatgttgaaatctacctgtgacctcgaagccctcccccaactttgagttttcccgctttccagctttccagatagaaccagtgtaaatcttacatgtattgattgatgtattatttcttcctaaaatgtacaaaaacaagctgtagcctgaccaccttgggcacatgtcttcaggaccacctgaggcagtgtcacacgtgcatccttaactttggcaaaatacactttctaaactgattgagacctgtctcagatattttgggctaacacaatgaatatgaaaaaacttttttgttggcgggggtgggaggtgggacggagtctctctctgttgcccaggctggagtgcaatggcgcaattcggctcactgcaacctccacctcctggattcaagtgattctcctgcctcagcctcctgagtagctgggattacaggcacacgtcaccatgcctggctaatttttgcatttttagtagagacagggtttcaccatgttggtcaggctggtcttgaactcctgacctcatgatccacccatctcggcctcccaaagtgctgggattacagggcgtgagccaccacacccggccaaaaacaactatttttaaagagcatctaagctcagaaatcacaggcatattacgcctgccactaagggagttagttccattgaaggatataattaagagtgaaatgaatggtgtgctaagcacttagggatagtggttcacaaatttgtctgttccttaaaatcaccttggggggcaggcgtggtgcctcacacctgtaatcccagcactttagcaggtcaaggccagaggatcacttgaggccaagagttccagactagcctgggcagcgcagtgagatcctgtttctacagaagataataataatcacctggaaatttcttttttttaatgcagctaatgaaggaaaaaaaaatccgaggttttgaaaccaactcaaagacaacagcgatattcaagcataagatgtaataaaggttgtacactagatagctagatagccagaataaaaaggaagagatagttacaaaaaatataaggaggataaatgtataggatttcataactgctaatcatatgattttactgagtaggtgtaaaatgcttctgataatgtgtgaaaatttataatccttcgtattatatgtaggataaacataggttaagacctggattctaaggctgaatttaaggctagtttatctccatccttagatttcctacatttcatttaagagaaaatgtcctgtatattgaatattcatgaaaatctctgaaaggtgttatgcttattcttaacctcttaaaggtgtacactgaatgtaattaaatcatttttgctggctctggttcctcatgaacatctgcttttgtacttccctgtcattcacaaatgcacttaggagctaatgatctatgaggacttttttttcccctacagtaacgagcagcaaatctggctgcactttaatttctcatctgctgtcccatattgtctggtggtcagttcatgatgttactaagcttggctttattggcatcttttgtgagctgctgctgctttttccttggcaaacctgattaccaagctattgcattgagcataaaataaaggtaaattaattcaaaataaaagtgaaggttgagggcaattcatttctgaggtagacctttaggatatgagatgcataaagtgaacaagatcctacaagtgtttacttgacttttctgggttcttttcacctacttactgattttgaatagtataaattcctggataattaatctggataagtaagtcgtcactgtacctctagagaaaataaaatcaaccaaaatatgtttaattctgtgctctgggtttcaagaaaacaaaaatgaataagatatagtcctacccccaaggacttgacacaatataattgtacatgtgcaaaagaaactgtctaggtgtggtggctcacacctctaatcgcagcactttgggaggctgaggcaggaggatcacttgagcctaggaatttcagaccagcctgggcaacatgatgaaaccttttctctacaaaaaaaaaatacaaaaattagccaggcatggtggcacatgcctgtagtcctagctactgggggagttgagataggagggttgcttgagcccaagaggtctaggctgcaatgagctatgatcacagcactccagcctgggcaaaaaatcttaagtagtctcaggactgtaccacagagtatcgtaagaattcagaggaggcaaagaccaaattagaataataagcacatgaaggcttccagcagaacatggtatttttgttgggccttgaacactctttagatgctttagtttaatgtgccatagtcacactttctgtattgggagtgttaatgggtgataactactccagagctttaggattgcttccagtatcccagcaaagcagcccttttcaactagaaccgtttgctattacaaaagagaggtgatcacttgtgatttcttaacatttcttcactttgcctctggcactgggcttctgaaagtccaggaaagagcaatgacctcagggttttaagaccaggggtataatcccagctctgcctagctctctgtgtaatttttggtcagtaatttaacctgggttgtgttctgtaaaatgatgatattggattaaatagtacctaatcatctaactttttcctaatattttattattataaaaaaatgcatgcctctgatgaattgcctttatcttctttagtcatatttccctaagaagtgaataaaagataccaaggcaatgtgtgaattccactttttccaatctggatgtttaggggatatccttgacaccatttgctattttgagttttcaacaaagagttaaaagaaaattctggcactcctatctagtcatcctctccagttggcagaagtcttcatgtggacttgatggttgcccagagcaacaaaatattagggacagaaacatgttcagggactcgattgtataagtgactcagagctgagagaccttttccagcttgactgcagcccatacttagctaaagtgggtatttgtctattcctgtctgcatactgtgacttggagatgcctattattttgcttgctaaaatatggaagccaaccttgaaactggcagagaagagttaaatgatcagaaggcaatcgtcttcattcagcacgtctgacacatgaaagatcattaggactagcaaatataaacaagatcagggagtggtcttgggctttgaagagcacataccaagaacatcaagagaactcaatataaattcaatataaaagctactattcaaggccaattatctcttttgagttagaagagcccaatggagagccactcacgcaaatcaataccctttccttctctcagttggagccagacatctctaactatcctctgaattaaactggatttttaaaatgtttttctgtccctaaactctttaaatcctgaggtcatcctttctttgttccatcagtctggctccatgataccaattactccagcttgttaaagcagttattggcatatggtagtcatgtcttttgtttctatgcaatgtttcctggagcaagaattggagggagaagtattagccaagtcttgttgctttaagtctcctctcttcaactgtttaactaggttccatcctaattatgtgtttggttggttttattttgatacccaatatacattcttctcatttgtacatraacaatgtcattatggtaataataacaattatacaatattactttctgtcctcattgaatgtcattatgatcaggagctggtcctcttggtttggacattatwatttgaaatgaatattctttttaaatgattggaaacttagtcgtaaattcaagtggtttacaatagtaactcttatcccagtaaccacagcacctgtttagaaaaatgtcttcggatcacttgtttgcaaatgtctttttccttaggatcctggatggaattgaacccatatacgttacttgacatgtgaaacacgtgtgaccctggcagatgatttggctgaccttgaaaactacagctgtttagtcactttgaaaacaatgcaatacaagtgatttactaggcttcagttttaaccattttatgctgactggtggaaattctaacccttcagaaagaaaaaaaaattgtgaagcaatggaaatgtaccatcctgggtattaatgtcattaattttcaatacattttctcacaaaaagtataaagaagtctttgcttgaccttacgggaaaaaacaacatacatgtggctttattttgcctttttttttttttaattaatgaagaaatccaagatttgacttttgtttcttctctacccaaatcaaaagcagtctataatctcctgcaaagatcaaagctttttgcttactataaagtatgtgccctgcttaggcattacatggtagaaagatagcattctgttccaagaaatctctattcgttctctagttgctgtgtatatattctcttttagctagaatatggttagtaaatgagtcctgaaaatttcgctgtatataccaaaacatgttgtataccataaatatataaaatatttttatttcaattttttaaaattgtgcttcaatcaagacagaagttgatttctttttccagaaattcagagtgagcagtccagggctgctgtggctgctctaaaatcaccaagggcccagagcttctttcagataatttttttttaacatttactagattcatagggcttttgtcttcatggtctgagatgactacaagagccctagccatcacaactaagtggccagcagcaagaaggaggaaaaaagaaggaatagtacacccactccttttagaaaaggcttctgagaaatcccacataatgcttctacttacatctccttggctcaaatttagtgtctgccacaaaagagaataagacacacacacacacacacacacacacacacacacacacacacacatatatatatatttttwttttttctggcaagtctctagttcagggatttcaatctcctttaagcaaatgagtcttctcgctaacctctccctctggcctgcccagtctctctcgaatctcattgccatcctgtcctccttactcactttgggaaaatccagctctgtcagttttacagtctgccttttccacttccttacctgaattcctgggaaaaataatcccacatcacttcaagctggaattccaacaaagtcaagacctgtcacctcatcggactctcagagcacttgacagttagttcctgctgtgcccctctctcagtcctcttcatgctaattccaaacctgtcctctctcttaagcctcccaaaccagcagctcttcatctcctttcagcaaataacttgttgctttttgaagaaagtctgtgtcaaggcatgaacttcctcagctcctacatcctcttgccatagatgttatccataggtctcttactgacatccataatcccttcctcccttctggtctcagcggatgacgtttcccttctccctcctgctctaagtcaacccctgcatctgggcccttgatcctctctcctcccagctcccacaagtccttgcttcgtctgttttcctttctatctctcacatcttcaatctttacttttattctggctctttccccattcatgtctctcacaatcttaaaaacaatacacagcaaaccacagcaaagttcagccaactctttattgatcctttagctagttcttgatcttctcttttcagtcaagttgctctacctcctcatccctattcagtctgcagtccactgtagtacgactttctcacaacacctctgttccagctgccctcccttggttgccaatgaactcctaattgtcttcttagttcttagaggcttcttcttcttaaactctttctttgttcatttactgagtaaatatttattcaacatgtttttgttgggagccattttgttccagatgtttccacactcttcttgctgctctgaatacttcttttcactattcttcatggtctctcttcctccccactttacctcttaaatgtgagtattctagaatgttctttttgattaattggttttctcactctgtgtactctgtagatgttttcatgtacctcatagttgtattttccatcttatgaaagtgggtcccaaaactctgtctctactcagagtaggcacttccccaatttccaaatttattcacacaaaagcccaatgtccattgatatccaactcttcaaatccaatatgtccagagctggactcacatatttctttgcaaatctgttcttcctatctcagttagtgaaacacttttagccaagatcgaaacttataaatcatgaatccttctaccaaatctatctgtctgtctatatatatttttgaaacagagttgtctcactctgttgcccaggatggagtgcagtggcaagatttaagctcactgtaacctccacctcctgggttcaagcaattcttgtgcctcagcctcccaagtagctggtattacaggtgtacaccatcacacccagctaatttttgtatttttagtagagacagcgtttcactatgttggccaggctggtctcgaattcttggcctcaagtgatcctcctgccttggcctccaaagtgctgaggttacaggtgtgagccaccatgctcggccccaaatgaatacaatttttattttattttataactattgatcaaatccatgctctcttctctaacctgctaatatttccctagttcaagcactcaccaactctcccctgaattatagtactagtacctgaaatagtgtttttgaaactgtcagttgcatttagcattttattttaaaaatatgatacagaattgcgtaaaaaataagagtataaaaccacatctataatatcaaagataaatatggttttataaaattattgatacacccacagacatgcaaacacacacagacattttgccatgaaaatgtatttcttactataatttttaaaattagagaactactttcttaaatggtcgatctctgttgcacctcttcttagctctggccttccatgatgccagcaaatttatgtagttgaaaaattaatctgcaaatgtcactcttcttaaaaccttttcaagccttcccatcatccatgataaaatcagatctctttcgtgtggtacccaaagcccctatccagatatgtattgtacctcctctccagcccagcccctggctgactctttcagcagcaaactttttccacccacgtgcaccatgtttcacaactgtcttcatttacttgtactcttctcaccatctaaaactcgcttctctctcataattgcctggttcactttatctcattttagaggacacctaaaattcaagcccagtccccttcctcaggccgagtcaggctcttctcccaaacctacctctagcataacctaatgaaattgctctaaaaattatggtctatgcctctttattaaaaaaaaacaacaacaacaaaaaaaaaaaccctgcccaccagtatagcaattcttttgttataaccacacatagtactagtgtgtggttctggggcactgtcatgccaacttacctgtgttcaatagacctgaagtagggaagatcagctgactcttttacatctcttctcagaacatcttgaaatgattcttgggtgcaatataagagcaaaacatggaacagtagaaaccagcatggaaaactttttctcctatttgagaaagtgggatgaaaatgtgtctcttaatccctttggcagaagggagtaacttgaaagaagtggatgatggatgatcttctccactctgtcagccctctgagcagaatgaggaaaatgtgagaagcgataccattgctatatttgtttcattgaccattattttaaataacttacatggtcctgaacaaggacatgtttttgtgaaaaggacaacatttcttttggtgtgtccgagtagcatttaagaaaagccttatagtggtcaatgaaggttggcctttcacccgctgctactggagagtctgtgagaacactatttattcagcctcatggaaacactagggagtcatgcctgggatctgacaactgtgcagcaccatgccaggtgcacagagagttgttgtgatgaatgtcgagagaggtggtgggggatttttgttgtttttgctccttccattttctttccctctgacttgggctgtggtttcattcattctacctccccacccctatgcaagaatagatctctgatctctttctcatactttatctgccctaacttccactttccttttcttgagaggagaagaacaactccacagtgctttccttttatgttttgggctaattttgttgtgttgttttatggtcttgaactgagagctgcctcagcactcaacaccagcccctggactgtgagactaatgagaaaagcaaaatgacttcaagtaaaaggaagtggtttgtgttgtggagagaaacttggaaagaaacaccaccaagaacactaggggctttattttccctaaagcctacagttgggttaacacatttcaaaataaccggtcaatttagttaatcccatcaaacgacctagtcaatacagtaaagaggtagggcaaataaacaaaccgttttttggatgaccggtttagcttcatgtatccttcgtcttactcatttctagggaataatttcaactcaaggaaatgtgaacatctgttttgcaaactattacaggctggtttaatacaaaaatacctttaaaaaaggtatgttcatactcaacatgtttttccagctgttattaaagcaggtagaaacaatatagtaggcatagaaatcttgattataatgtggaaaaactaaggttaaaattattagcagaaatacatttcttttccatccttccactgtctgaacatctctctttcctacttcctccattttattattttctttgctttgtttctctcttttaacctcaataataacaattctgtgtgccaaacactgtgctaagactgggcatgcatgatcacataaggtaggtaaaattattattcccattttacagaagaagaaactgaggctcagagaatttagggatatgtcccatggtcattattctggaaagctgtggagccaggcttcaaaacttggcagttatatttcagattccacaccctgcagtcaacactctgctgcctccctcaaattttatctcagttcatttgttttctccgatcttctccttttcacatgttctctactctattctcttgcctttttcctttccttatatctgcctcttctttttccagtctcttccctcactccttcccttatttgtcttgtttcccattctttgtctaaatctcctcttttctctccctcttcaccctattcattcccagctccctaaaattatatcattcttccttcatcatgctccctcattcctcactgcagcatcacccagtccaactctgtcccatctgtgattcctcacttctgctttcgcaccatctctctccctaaggtagaagtggtgcccagctttaaacacaaggcaaagtgagggtatgttccactaggacagcgtgtgtcactctgctgccatacacagggagtaccatcagtgattataaagaggaatttcattcctgccagagagctcacaaattaggttattgttgatgttcatatagtttttagtgactggaaaaagataatgcctccttctatggtcactaccaggaagtgagctccatgcagcagacagaaaccaaccagataactgtgagatcccagccaagcacaatttctacatgttagtcaattgcaagaaacactgagatgtaatgtagtactttggactcatattactcaggtgactatgttttcaagcagccagtacaggacagaagagattcatttccttgaatcaaagctatttggtgacttttcctggaaacactctgaggcttacaggaagggattccagattcccaagctactggcacagagtaagcatcttttctttacatagtaattcacaaacgtccctcatcaccatatgacaatatcctcactggatcagctcggttaccagaaataactagatcaaaataaatgtcattctcacatggacacaggtggactagggtttagaagttttgggaaccatcacagttctaggcacctgaaacttcttcttttgcttgtagtaaatatggtgtctttctcaggactctgccctttgtttatttatatatctggtctggtttttgttttctagagatagttctctactctccatagtgtctgctttctcattgcctgagtttgtacatggcttgccatagcttctctaggcccaattttaggccatcagtagatttaaaaatttttttttctcttgacaccaattaccttagttgcaatttcccatttataattgcaacttgagcctacaaatttacaaatacaatgaggtaactttccactgtggttaaatattatagattattggctgctggtaaacccatgaattgcctgcctttggattagatattcagaccaggtccatttaacaattcagacatttttttaaacaatacttttttgagagtcttccatgtgccaggccctaatcaaagctcttgagatacattgatgaccaaaaagaagcattatccccattcttactccttataatctagggtccagcgacasggcgagatatgcactgtattaatgaaataatctgtactgaatgtaaaattccaaactgaagcattttatatgaaggaaacattctmtaaaggaaaagtgcggaaggcccccagaacgttccagtctacacatgctcctggaattttatgggaaaataaaaagtctgtcagaatggatcttttgagaagattccagaagtatgttggccaataagagaaaatgagcaagtggatgccagaagccatttcttccattgttgtgctcagtttgcagtgatactactgcagagcttgaaaggcaagtactggcttctcttcctcttgttcttccacccagaaaaaccatccttatcctcatattcctcctccaccttcaccaccactactacctattttgaggctgccaccaccacactataacatattcctccccgctctaaggctctgaatttggacctcccacatgacaggactctaaataatgactaatccattaagtttctgctccatttccaaaatattcattcaaatttgaaatgcctggggcctcttgtgtagccatggctgggctaatttctgcatttgcattttaaacaccctgaatcaggattacacctgaagactttcaaataagtgcttagatggcacaataaagatattcaggttaaaaaaaaatctaatgagtctgttgttcctttgcaaggcctagtgataggaacctcttcttggaaatatttgttaagccattctcacttgtagtcactcttggtaccaaatctgttgaccgaaaaaaaaaaaaaaaaaaaaaaaactcgaggagagagggagaaaggcaaagttactctaatgttttaactaacccatataaccacggagaaccagccctaggaaccaacactaaaatcttaaggactgttttttcagactctgaaaattctcctaaatctccattccagtatcattcaagctctttacaaccgctgtttgtccttaggctgtaacttgtgcctgaaatcccactctaaggttcccttgtggtatttttaatagtgtttgatgctgcagccagcttctctgcggtttgggagttaaatgggatacagcaatgtggtgtgctgtaatggctcttggagaaatgttagggcaaattaaattccaaataggatagcacctgaaagaacctggtcctttagtgaaagagcgtaggaaggaaggcttagagagtcttactggctcctaagtgattaagaagaaacatctaacctgagtttgaaattcattttggactcaaatacagagtatttactttaagacactggtccttaaccacctggttcttccctgtttgcttttctgcttagttaagcccaaagatgggtgttagtttaagagaaaatggtactaaaagggaggaggggaataattaacacctttgcttaaagcaccaaatcccatgagctgatgattgcctaggttaggcaatgactactaccactactaccaaacaggtctggcatctcctattcctatcctgacacccaggcccaagctgagcacaagcattgcaggattccgcagcctaatgtccgtcagcttttcctttgaacagtggttacatatcgttagtgtatttgagtcaaatgtgggtttaaggtagtggaaagacttttttctgctattgagaacagaatcaattttttaaaatgtgtatgtacacacacagatacacacacacacacacacacacacacacacacacacaccgctatatattttattttggaaaacagttttatttccastagatctttattgaataacctatcatctacggagttcctatttaaaagttttcattggtaatggatttattccagacaggacaggttatatgtaaaatacaattcgtaaccaattaaaacaataacaaataacttgtgctgagtggttaccatgcaggtgctgggatacgctttctctctacatcatcatttcaccctctccacactgtttgaggtgtggatctattgtcattgtctccatgctataaatgagatgaggcacagatgttttttattatctccatgaaacaaatgagagcactgaagcttagagaaggagagaaacaacaacttgaaggtttagatactgtttgaggagttatagtaaaaagaaaaatgaaaagtcctctcaagttccactgaaaatcttataagtgtgtttctttcccacttttgcaatataatttttctcttctaccctcaactgaaataaggtcacacagcctatacagtatagaaccaggactccaaggtcactgacaacaaagtaaaagtcagcagttttggaaaatacatattttttttttcctagctgaggatgggttaccttcattagtgacataactatgtcacttgaatatcaattattggcttgaatatcaattcatttctctattaagaaaaagaggaaataactcagatataaatgatggaagtggctactgagttaggaaaacatttgaaaatcactttataccaagaaatcacattctggcaggcctaatatggtataggagatattcgtaactggttatcttcattgaaagattatagagactagagaataggaaggttaagtaaaaactctacaaatgataaaattttatgttaacaagtaacctaaccaaatactgtatttcgctggactttattgtagacaaacagaaattctggcaaaagaaaaacaacaaaaaataggaaatacagttactaagttaaagctcttgcatttacattataagtatttctaaatccagtttaagattgtggaaacaacaacagaagtatatgaaattctaaatgccatttaattaaagtgttgaaagagtagagatttcaacagtatcaaaacttgtgatcttcaaggatcaaagtaaaggtgagtttatagaatgctcactctaggttctgatttggccaagttcaatcacaccactgcccaattcaatgaaaaatataggcaactttgtcaagcaatgaattttatcaatgtattcaaagttgaatgcatcttaggaataatttgagggtttagaaaatgtttgaggttttttttaaaaaaaatcttccaatttaactgaaaactcttgtatttcctttctacttttcaaatatagcctttgtcctttaccctccattgtagcttaagatgtggtcttgcattataaggaatatttaaaaccattcaatattttaaaccaaagacattcaatttttaaaatttaaatggaactgccatgtattcttgagtgttgtagctatacagcagtggtccccaacctttttggcaccagggactggcttcatggaagacaatttttccatggatggtggggagaggggttggttttgggatgaaaccacctcagatcatcaggcattagattctcataaggagtgcacaacctagatgcctcgcatgcacagttcacaataggattcacagtcccactgatctgacaggagataaagctcaggtggtaatgctcgcttgcctgctgctcacttcctgctgtgccaccaggttcctaacaggccatggaccggaagcagtctgtggcttggaggttggggatccctgctatatgggccagaaatgtgaaagaggtgttcagtggggagtatacttctaacttgaatacattcttttcagcatttctacttattttatcaaaaggtaattttttttctcaggaaataaagcaataggcaattgttttttatagtttttctgtacagagccttattcaattatactaccaatgtaatcctattgcactgctcaacagaatcagaataagaagaacttccaagtacaatttgaaaataaaagtatctttcaagaatttgcactgtactgcattatttgatttggaaaaaaaaaaaaatcagaccacttccatttcttgatgaaacaactaactcatttgctaactttcaactggctctcttcagtggctttgagaatgtggcacttccatcataccttgcctgtagtaccaccctagaactttttttaattgaaaatattttaaaagataattgattcgtatgcttcaaaattcaaaacgtgccctagaaaggatcgattattaacagcttcttgtgtattatgtaaacaaatcttatgcatatacaagcaaaatacatattggctagcactcttaaaaacataggaagggttgaatctgaccaagttaatatttcaaaggtgtctatcagaaaggaaaaggaaagcttcctacagttatgtgtatatttttttttagtttaaaaagaataagaacaagatattgggtgtgtatgtatatatgtatctatttatttattggagacggaatcttgctctgtcacccaggctggagtgcagtggcaggatctcagctcactgcaacctccacctcccaggttcaagcgattctcctgccttagcctcccgagtagctgggactacaggcgtatgtcatcacgcccagctaatttttgtatttttagtagggacagggtttcaccatgttggccaggctggtttcaaactcctgaactcgggtgatccacccacctcagcctcacaaagtgctgggattacaggcatgagccactgcgcccagccagattttgggtttttaaacctattgaacttatctttggatacatattttaagttttccttaactgtaaatgtgtttatgttcactagaaacaccacatgatttcgcagacatggaattatgtaggtgaaatcagcggctttcaattagggctcgataatattagatatagtataacttttatggcattcacacatactcttcagggataccctttgcaattccggaatagtgtttttcttgcttacttcagtcgatttcttatatctttaggaaagatctgcacattcattctaggtgaatgtaaaattgcattttaaatccattcattgggaatctcacttcttaaaaatcatgcggaaagatagatgtacatttttagtaaccgagctgttcagtaaatttcttaagattattttctcataacctctgtacatcaaaagtgaaaagaacctgtccccttctctctgtatgcaaaattccagagaagcaccaagaaccagaagaagatgaaagattcggaagagcacacattttccagcctgccagcctgggtttaatttcactttcccaaatatttacttggtaaattcagaaaaatcactggacctccaggaacctcatttccattactgtcatgtgggatagtgataacactatggatcattacaaatattaaattagactgtatggagaatgctccaaaagctaaattattgagtgctcacaaaaagcattcaacaaatacacctttccagttgaaaatgatcattccattaaattcaccctttattttctttgagaaaaaaaatctatgcttctgcattttcaaacttacttttcatggatacatagtctgtaataaaaacagcatattaaacatacctttaaaagaacaaagacatttataaaacaataacaacaatcagcttctggatggttcccccccccccccccattaaaccctattaaagggaatacggtctctaaaagggaaatccagagacctgtgtattcgagttataaccctgggtcaagcaacttaactaggctgatattttggcttgatgtgatttatatgtaaccttttaagcaatgtatattaaatccgtactttttactcatctacttgattgcaagctcctgcaagataaactttgttgaactcaaatgttgtaaacttcatggggcttagatataaactacagacttcatcagtgtttaacaaatacttgcttaagaaacacaaagtcctgttatatcagccaattaactatgaagctaattttaataactgaaatatcatagaggttaatattcaaaacaccactcatcttttttctcattgagtattatttatttatttttgctttctggagacatacgtttaccctttatttactgtctcattttgtcatctctgaacataccatttacagctttttagttattctggaaaaatcactttgtatgaaataataggctatgatggctagaaaggatctcactgatcatcagtgcaaggattgattttagaaacaaggaaagtgaaaccagagacagccagtgactagtctcagtactcagagaggtcatggttggtcagaggtcagaactcacatctcctgacccacagcacgtttggctttgtgcacaactgactgccttagttaaggacagataattcttttctctttaacaatagaaaattagactaattaaagtcataaaagatgttgctcctttataagccatagagaaacccccgatggtttctttatttggatctgtgatctttaaagcatgtgactagcagctataattggattaaagtgaaaacatgtgattgtgaaggagttaaagtacctttgccttattctgctttgatagccagcttcaattgcacatcgtgacaagcagtgaaccaacatcaaccctgtggaattaaaactttagactctatcacaagcttttccaagttcaaagcccaccaatttattattggttccaagttctaggtctagaatcaagtcagctgggacatcaaatacttgttacaaaatgacatttgaatgagataattataaatagcactagaagcacatgaattaaatattgcctgaacactaattttcttaggtaggatattgggatgtcctttgctttatcactttgcagtgatgtgagcagtatgagatactatgttttgcaaaactgtattaattataatatttattgagtacttactatgtcccatgcacagtccaagtttttcatgtacatattattatttaaccttcactgctatgcttgcagatggatgtgtggtatattttagttaactcgctcaaggacatgcacagtaagcggtgcagctgaagtccagactgggtcaggctgactccacaacctcttaatccctatattaaattgatatatctgcccatgctatacatctacttgatctttaggttgatttattgatagtgacatttaatttttgttttcttcaaaattaaattcttactgtaaaactagtcaaggcaactgaagtttgtgtttgaataaaagtgtagagttaactgaggatttgtgtattctcattccaagatgagaagggagggagggaaggaagaaagaaggaaaagagggagggaacggaggaagggagggagggaaggagggaggaagggaaggaggaagggatggaggcaggaagtaagggaaggaagtgaaggaaggaaagaaggaaacagtaaaggaaaagaaaggaaataaaaagtaacttcattcctctatagaatctctattaataaatgttattttttaaaaataaaaatacagttatttttcatgaatataaattttagaacatatttttcagtgctccttacctaactcccaaataatccattacttacatttctttttttgagatggagtctcgctctgtcacccaggctggagtgcagtggcacgatctcggctcactgaaacctctgcctcctgctttcaagcgattctcctgcctcagcctcccgagtagctgggactacaggcgtgtgccaccacgcctggctaatttgttgtatttttagtagagatggggtttcactcgatctcctaacctcatgatccgcccgcctgggcctcccaaagtgctgggattacaggcatgagccactgtgaccagcccatttcattctttataaccattatgaattcccacctagtttgagaaccactacttttgtgtggtttccaccctttgtgtgatttcaaaaaggctcgcctttaggcaaaatttagcaagaagtcaagccaatcaataattgcttgaagtcaacttttccagaataaaactgtataagggactttgaatttgaaggttacmatctaaagtttgctttgagatgggaataatacgtagtgttggggattattgtaaacctaagtgatctaattggaaattagaattgaaagtgggaaagtgaaggaggaaaaaatgaaggttggggagaaaagaaagcaatttaggagactctatagggaggaaaggatgagatgcatttcagaaacaaaatattaacgtaaacagaaaaaagagaaagcaatcatgacaaagcctaagagggctagtggaatgctagaatgaactcatttaccttcctttgatatttaggggctctattgcctgctaatttcatcactgttatttttcttacctcttatctttttccctgtagttattatcagcctaatattcattcattcattcatttacctgagttttcaggcttgtgcagagacaacagggtggggccaggttgcaagattgtgttcccaacttggaagtaacgtgggtaaggaaaaagtcacagctggccttagaagacacaagttaaccacatcccatgggtcagtggaagaaaacaagggaataattagaaaactgtgcaagatcagaagggagcccctgaagctataactgcaagaacctccagaccctattgcctttaaatccccttttaaaaggcaccaagtgaggaaaattccaagatgaatgggttacgggtctgaccttcaggaacatgtaggctgcctgccgatgtccacaacatcgtccctttcacatgcctaatacattagcgtgggccactcatttaaaatttaaaaaatttcatttagcatttaaaaattcatttgacagaagagatgtttcaaataaatagtcttcaaaaaaagcccggtctataagtctctgtaacacagcccatctgctttaggtgaagtgaggcagtaggcctggagcctcacctggttggctcttaaccacatttactttccaggagaagcctttcaccaacttcctcagaacctccaaaacaccaaggaacaagatcctgaaattgtccatagtcttaactttgttaataacagactgcatgcccctggaaaaactatttcacttctcttggcctcatcaacaaaacaaatgtggcctaaaatactttgtaagatggtttcagttgtaaacagcctgaaaactcttagtacaactaatttgggcaagtaggtttggctacagataaagaacagaaagacttagacagtggtatacattactctgaaatatttttattatgtaagtacaaataaatggatgtctaattgttacttttcaggtagcaacatttgtaggaaatgcattttgttaggaattttaaaatcactgaacagattgccatttagtttacattttcttctcacctgcagatcctgaaacctctgaacttttcttctgccacataagtcaaatatccatttatagtttttaactcttctctttggcccctaaaaatagaagatcattcctgattttaaaagtagcacttgtatgcatatatataatttttatctttaaaggaatacgctgatgattcctgactctagccagtcctttgcaaccttcaaaggattgtctccttggccctaagatgtaacattgttaaccttttatgacagaatcacgtcaaggaatattacatctcttctagttcctgtaccatatctttatgataagaatgtgtgcttgccatctcaaaatattgaccctctggtacaatcacttgtatctacttgaatacagatgtcttgttactatttctggaaaatattcagtaacaaatttttctctgaaatattgttattaaattttcttaaaaattgtttctaaccttctttactagagctcactataaggtagtctttagtttaagaacttcaacactctctgattttggtttaccattttcatttgtgcaaaatgaatgtgtacataagaatctgtatttccaacccaaagaggcattataatgaccgttaaattttccatccaagaaataaactaactccaccatccctgagtgtataccctgcccttctcactcttgtgttctttaattagacccaatgtgcaggacatgacttgactgaaatttatagccacattgagacatgcagctaaagaaagctcttagaccaggcatcatctcaaacttttaaagcaataggatcatttgacagaagtgtgactcgctatagtaattacacaggtgcaagttataactacttaatctgctcccagcatctctgttgcccttgagaagtatgatgtcctctagccaacatggctgttcatatgggactgaatctgcacatatttgaattgagtttttcaagtttagaaatgtgatactattttacccttatgtgccttccacaatcctactcctctcttaggtggatcagagtttctggaatccatcatctttagttctgcaatttacatctcagacttacatgtttctaggcataaatgcaagaatgacaacatcaaggcctatgaaacttagacttgtatgtatgtgatggtagacattgaagtttgttgcaggaaaatgtttctctgtcatcctaggaaaagcccccagtttctcagttcctcctcctccacacgacagttttttagtttttttagttttttagtttttttctaaaatggagttaagtccaggtgcaatagctcacacctgtaatcctagtattttgggaggctgagatgggcagattgcttgagcccaggagtttgagaccagcctggacaacatggcaaaaccccatctctaccaaaaataaaaataaaaaaaataaaaaaattggcatggcagtaggttccagtagtcccagctacttgggaggcagagcctgggaggttgagactgcagtgagccgtgattgctccactgcactccagcctaggcgacagtgagaccctgtctcaaaataaaatccaattatgatcatacctctctcctgttgatgtccatcagagtctgcaatgccttcagggtaaagtttaaacttccttctagaaacaatgttctgcggtaaaatgaccagggtctttggtattagatacacctggcctcaaaaaatgggtcagcccaggtataaccttccccatcttctgtttcctcatctgcataatggagtaacaaacattgtcaggaagttactggagtaattgtgtgagataccaaacataaaaagcctggcacaaaataaaagctcagtaaatgtaaatgtcctgtcttttgcctttccctcattgtctgcgacttacctttctaggttcctttctcccatgtgcatccccttccttccaaagcactcattgattctagcctgcagtgtatagtttcctgatcaagccaagctctcccacacctctgtaacttttgcgtatattgttcagtctccctgtaagtcttccctaccttcaccttttatagaaactgcagggtacctacttgccccttgagatagctattcctgaatttctcccgaatttaagcattcctcctctatactttcataaatctttcacacacctctttcatcctacaatgtcataatattagttggttttatctgtcttccttaatgtatccttaactcctgagagtggacgctacatcttagtcatctatgaaaccccagaaaatgtaatcaagctaaaatggctcactcatttcctagcaaatattggttaaatgactgaatggatgatacagggggcaaaataaatatggttttagaaaagtggcatggctgctgatctatcagtgcaaaaaggagcacacccacccactacatggccaaaaatgttgaaggcaagagactagatggcttgtgaataatatcaaatgaagttgtctttctgtaggaagtcttagacaatgtaatcttgggaggcgggtggatcacaaggtcaggagttcgagactagcctgactaatatggtgaaaccccatctctactcaaaatacaaaaatagccaggtgtggtggcatgcacctgtagtcccagctactcaggaggctgaggcaggagaatcacttgagcccaggaggcagaggttgcagtgagctgagctcgtgccactgcactccagcctgggcaacacagcgagattccgtctaaaaaaaacaaaccaaaaaaagaaaatgtaatcaagctaaaatggctttggctttccttcagtaaatggttactgtgggaatatatgtgaaatgaatatcaatactatgatgagaaacacatgcactaaacagctatacttctgatgccattctcaaatctgaaactttgcccaatttcagggacaaaagtgaagtaatatgtatccccagtgtttagcttttctcttgccatggatactaacagtgagattcctcagggactgttcctttaacctcgttagggttgctaggggctattgtgcctttcacaacacagcacctgcaactgggaataattgaaattttctgccattagctattcccagcagagtattctgagtcacatagaaagtgtcagaagcatataaattactgatacattttttaatcccatattccctcagggttggcgtttttctctcttgaaagtttcccccttaaggctgggcgtggtggcttacgcctgtaatcccagcactttgggaggccgaggcaggcagatcaagaagtcaggagatccagaccatcctggttaatacggtgaaaccctgtctctactaaaaatacaaaaaattagccacgcgtggtggcgggcgcctgtagtcccagctactagggaggctgaggcaggagaatggcgtgaacccgggaggcggagcttgcagcgagctgagatctcgccactgcactccagcctgggcgacagagcgagactccatctcaagaaaaaaaaaaaaaaaagaaactttccctcttaaaatattcttgtttaaatctaaattaatttcatagataccatttccatttttctaatgaataatactgtatcctttcctatctataccatgaagtttttctttgccttgaaaacccatttagatttatgatttctagcccccaaaataacttttgttcctatatccaattccttccctcacagttctttcacaatagcttcttttctcctgtaaaaccctacataaactccaaaaacatttctagttttggaaatcctaatccaagaggtcacatcactaacgcaaacgtagaaatctttgtaccaaaggacagaggtgcaagggaagtcgggagttgtggctgtgggaaagtgaggaggactctttggcatctgggcagaggtacagggaagccaggatgggggcagaaagaaagtttctcagtttctcttgtgtctacggttcatgcttaggcctctgcagcagccccaaggcaggtgagggtgatcagctgttccagtttgcctggcactgagggatttcctgggatgtggggcattcagtgctaaaactggggaagtcttggacaaattaggacaagttggtcaccctacctttcccttgctgctgctgtccttttaaagtcctcattcctttgaaaattgcagtgatcttcagttcttcgtgattttaactgtatacaaatattcaaagagcttggaccagcacatttctcagagagagctctacttacagtaaatgttatgtgacagagcaggatagcaaatagatgttacctggggcaactctaattgcttggtcatgactgtcgggagtaaagtgttaatagtttcttgcatatcctccaagagagtattacaaatactattctgcaccaagctctttgtaatttaatagtgtatcttggggcccttttgtatggacttatacagatcatgatctagagataatgatcattcttatttgacacatagtattgcattatgttatgtctaaaaacccatttaactctattgatagtcttgtgggtcatttccagtttttactacaattaatacaaataacactgcaggcatccttgtgcctgaacatctttgtgagtttacccattgaataaagtcttagctgtgaaactgaatttaaaattttcataaatattgccaagctgtcttctaaaaagaatatattaagttacaatcccaccatcatcacaagaaatgcttgtatttctatacacactgaccctgagattcacaaaaaacatattttccccatctaatttaattgcaaagaaaattagtcacctttcatacatttatgggccagttccctcctacctccaaagactcattgaatcaattatcttgaggagtttattttttatggatatgttaatgttttgagtatattaagaaaatgaactctcctcatttgtgtaaacttttcaaaaaattttaatttgtttagggttttttttttttatcatttagtcttttaaaatatttgagtagtcaaattcatcctttcagatggtttctggacaccctgtatcttttatgcttgtttttcctggcattcggtgcagtacctatcacaaaatagattctcaataaatgttttttaaataaatggacaacgaatgcatgaataagtgaaggatataatttattcttttcattcctcctcatgctatgtagagatttgcaaaatgaatgccaaaacatatctttgaacagaatttcatggcccagtatcttcaggcagtggtttttctgttttgttcaaaatgatgtccctatcatctgcatagtgctggcgtatgggagatatacgtattgaatgaatacataaatatagagaataatgagataaatagaacgtggattatttggagttcatcctcctgagctaatgatgggcatttctggaagtgctgggttgcaaataagtccagaccagagaggattgtgtttaaaggcccagaatctcaactgataatcctcagaagctcagatttacttttttcattccaagtaaattaaactggagtggtaagaaaaagaaaaatggttatgaccatcaaccccagaaacagggaccacatttaattgaatttataatgtccctaacatctctgctgtgtttgaaaggttaaaaatttcctagagaaaacagcttttgctactacttgccaaagtactcataaaatggactgattgctaagaacagaaaacaaaccaaatcaaaataaaatgaaccaaaaagcaacagaaataaatgtgccttaatgtagttggatgattaccacatctactctcctcagaccaccagccttcagagtaagggcacatccttccaaataagtgcatccttgtcagggacatttggtgaggtgcaaccccttcaatgtgtccgtttcctgggtcatttggggtcttaggaaaatcttcttgttggtgcgcactgaattgcacatgcattatgtaactcattgcaacccaatagctgaactcatggtttcatagctattaaaatatgccacaaaccaaaccacctgtgaggcgccaactcagcaaatgtgccttttcagaaagtagtcataaaaggtacaaaaaatgaggatgaaagaaccctgaataacaacctagagctcatacatttggagccatgaggaaaagtattccatgtaagttgaaggaagatagcagtcaggagcattggtgttgaagaccaccctcactatgagaaagggtcatatatataatgtggaatgaatcagagctaccactgtgggtcccctgttggaaaaactgcaattttggataattatgtgcaagcactaggagaaatgccagatgttagaatccatgtttaatgtgaaaattgcattttgttgtttgcagaacctcaatatatagctttctctataaaatgtgggcatatttctgaaggaaagaaaaatgccagggtttcgttttaacatcctgttacgttttagttaaattcaaaggaacatgacttttcaaagagaaaactgtctctctctcataaaatagcattaagtggttccaaacatatcttaggttataattgaaattggactctgtggaacaaaattaatgatggtttgttctcaaaggcccattgtcccgttgattttatcagttattctttgttaataaggtggtaatgtggtcttaagagcttccactactgagagaatccaaggaatcatagataagtaaattgatgtcaaatattatgactttttctctttcattcttgtactgtatctagttgcctcatctttttttctaaatctcacagtttttgatcaaattccctagggacagcttacatgctagctttatgagggaggtgagtcatgcaatcccaagaaagcaaaagtggagttgagggggtgaaaggaacagcagtagggaagaagagaaaccatgtacaaggtaatgcattactaagcttgtcagagcttcccaacaacaacaacaacaacaacaacaacaaaactagttgctaagttacaagggacattgcctgtgaggctgtgtcgtaaaacattccacatggagaagaaagggtgagcaatttttctgtgcataggtcttttgtctctcattggtcaaagtttgctccatggtacccttggccctcccagagtccctggggaatacagagcctttgtccatctcacgtgtagctggatggttcctgtcaagtcagaggccattgcccacgctaagcccgcaaggatggggaggtggaaaacatgaggcaattgcagtgataaccgctgctttactggggctgctgtggcatgcctgggaaactgggagagtggcttatgcccaaggggtagggtgggcagagctgacctggggaggccacaaacaggacctagtgtacttttctacagtatactagcagaattagaatgaatcagacaagagatttattaaattaagcttttgtaatgtcctgatgtagtgcactgtattttaatgctgtgtcttctgttgcttgagttcctaatttgtaccaggtgttgtgccaaatgcttcaaataaattaccttgtgaaatcctcacgactctatggactccaatttacaaatgagaaaactaagacttaacttgcttattcttcaccaaggctaggaagtggcagagttaaaatttgaatccaggtctaaagccattggtcttctatgccatagaatcggcatccattttgctactcttactagaaaatcatgaatcctagctatgaattgtagtgaggaggaaagttttttctgtttcatgtttatgaaaaaatctctacctttttcatttttttggttggttttcaattggccaatggttggaaacaggcaattttcagagattttgtgtaagagtgtgtgtatatatatattgtatatttacagacagaaaaaaattgagattaatttttcaattctctaagtcataagagaatggaaaaacagaaatggacaagcagaattttttatcccaatgtattctttgacatacactggtcataatgctaatgttagcaaaagaaataaagaaatccctggtgcaatgggatgattgaccttcctttagcagaacagtgttgacttgttaccgttgtcaaatcagactgaacacattcaacaacatgatcatttctacttgtgggtttggactgacaaggacatttctagtatatcttgttgacatcaggttaataagctctaagcaaagctgaaaatgaatgctacttcccacaatcaagtggaaatgttaatattatcaacatgtcttaaaggccatgaagtcctatgcctgtatatgtaacaggaatagcaaacaggaacttttcttaaagggaagattaaactagtgttatttttatgtattcgttaattgcatgctccccatttttaaaactgtacctgaaaatatactgtaataaaaaattaaatttgaaatattataccattgaataaggtcctctggatagttttgagatttaatattctttatttcaatttacatgtatactgaatcacgtaaaagttatttaggtcagtacttccccacatttgttccttcatgacatacgctgataactatatttctacgaaaactgcagtaaataaaggatgtggcttgtgttcagtctcccacccactagcgacaagagccaagggaaatcaatagcttggctcacctgtcatctccactctttggcacaccattgagaagtctaatatgtgcaaagaaaagttaattttactttcaagggttatacctttgcttattccaaagaacggtgggggagtgtaccagggccattattataatgtatattattaaactttttacattttaactgatttctcttatagtaaaattaattatatattagctttggggtatacaaaattgcactttgataataatatttaggaattggcaactttgtgggcaaagttgtgggaactatcagaaaagtaaaaaataaaggtgggacccgaaagaaggaaggattgtaggttggagccatacgcgactagaaactaagacatgtatccttaaaaaccctcaaatctgtgttctgatgggaaaaccctgctaagtcaatggttcccagactttggaatttcaaaacaaaaaactgtgaggcccaacatacaattaccaactcttcatttttgccaaacaaaactattttcaacagaacacactaacatatactggaaccatgatttcatattatgacatttattttccacattctatatacttttaatatgcaaaacaaggacaaaaagggcagtcatctcccatggggggcttagaaatctctcattaatgtgtgtgtgtgtgtgtgtgtgtgtgtgtgtgtgtgtgtgtgtgtgtgttttaaattggccttattatttctttaaatttaaccaagggccagtaaaactcccttttggaataccacacgcccgtgctgttcaggaatgattatgataaagtcattcatgaggacatagagttatttcatatgctctcaaaaatgacttgcagtgcgaaacacagctactattggacaagacaacaacccaactttatataacaattttttaattcactagtacttgtgtatcagtcaataaagtacctggtacttgtgtactaggcactgggatggagttggggatacgaaagtgaaaaatatagtcacaatttctaccttatactctagtaggggaaagaaaaacaaaatgtatgattgaactgccttaagcaccatgaaggcaacatacaaattgctgtgagagcatataaccaactcagaaatcagccttaaactgagacctaaaaaggactccccctgtgccttttgtatatttaaggcatcttttttatattctagaaatacaatatcattgagcagatagattccaaagggccatcttctagctggatgaaatagaaaagggcacccyttcctcaggctaacagccctgcctgctgagggcatagttaggtgaatggatcatcactaatgaatggatggttttaaagaagggaataacatgaccaaatttgcatttaactttactcaatagtctggagtatttaaatatgattaaaccttttctttccattcacttgaatgaggcagaagggctattcaggaatttaaagttgactaaggtattgattgggtacaaaatttttactaggtaggtaagggcaggatgattccattagaaacaagaactttttctccagtgctctgggaagaattgattggttcagggctaaatcaccaagatgaataccttcttttgattcacacacccttttgacatctgggtttccctgaatcatatgcaatctaggacttacgcagaccactccagtttcacttacgaaatttgggttagccaacttaaacagtcatggctgtaatttgcttctgagttaaaatgctattattattttatgttatttatggattcctgcaaaggagaaagcatttttattttgataaattttgttattaatgaaattaactcaattttgtagtaacatagtatacagtgaaaatgtgctttacgagatgccgtgggcttgtctctcaaatggacaatgaggctttccgaaacctttgtgcctttaagtttaaggaattgatttggcgtcttatctcagtgtacacaaagcttagttatcacctaggaaatattggatgtttgtctcagggagaagagacaatttttgagaccacaattaggttttgtagctatttgacatccaattataatcagatactcagtgaaacatgcattcataatgcaggccaatgatcatatatttggcttagcttttcactagaaaaattctttaaagaaatattgtccttccaattttagtggtactgaggaacagctctggttataaggggggaaatactatatgtcctttgttcaatcttactaatctttattaattttatgattttccccatttattttttaaaaatcattaataaaattatccttgattgagtttctcctatgtgctaggcattgtgataggactttagtaaacatcatctctaaccctttcaataaccctgcaaggtagggtcatattttatagataaggaaactgaggctcagagaagttatgtcttgaaattatatagtagcaagtggttaagccaggtttccaacacaggtttgtctgactctaaaaccagcatctgcccccatctcctcaccattcgcgaccagaatgtgatgcacgtctaccaaaaagagagtagcaaaaggtgatttatagaagcagttacagtcctctgaagagaaggcaaaactattggggatagggaaaaagtaactataaagatcatatttatataatcgaatattaacttaatggcttgaattaggtggcaaataaaatatattagcaagcaatgttacaaaccatggtgagagctatgtagtagatgaagcagaatgatggctgggctcagggagctcatacatttggaacccagataaatctttgctccttcttcccagagcccatcatcactttttaaaaacacgtctttgctgggctcagtggcttacatctgtaatctcagcactttgggaggcaaggcaggaggattacttgagcccaggagtttgagaccagcctgggcwacatagggagatgctgtctctacaaaaaataacaaagaacaaaaccatctgaatttcatgcattccaacatatattattttgttccattctacttaataacctttacactagttgtgaaactcactgaaaacaaaggagaaactcattataattcatctaaacattcctgaaatatcactttaatcaaaaaattaagaaatattgctcagatttaaaagaaaaatggaaactcccttggcaagtgggtttgaggtttggtcattaggttttgaataatcaggagctatgtgttgtagtaggaaaagcataccatttagagagagacagctttagtttgtcagtcctgcctcttaataggtggatgaccttgagtaaagcatgacgcagcctttgggcatcagtttcctcacttaaaggtagaagggttgaaccaggtgtaagctgctgttcttccatgttatgattctaaatagttctagatggaattatgttgcacatttcatatgttgttaaacagcttctctctggaacagttgctcctaatctcctaataagcttactatgggtcactcagcaatcttcaagagaaacaaacattatttggttggtggataccaagacaattctgatgtgtttgtgtcaaagattggtcagatgaaatctaactagacatgtatcattccatcatcaagcgaaatgaccttgactctaaacatcttaatttgaactgtagacatttcccaaatgctttagggtagatttggaccataatacactccactgtaaatggagaaagttcatcatccccataataattgcccccaaactgctaggtaggaatgcatactgggtttagtatgtattaactcccttgtgaattcagcttttgagagcagacctcttaacaagtcatgagtatttagagtgaaatatttaattcttagtgatactattttcctattctgctattattattcagctatgattattttccttctcctcccaacctcctatttctttttctttattaaaaaaaggagaggaggtgcatgctgccatctggggtgaatatgggcttcacgtggggacctgggcgctggttctgatccagagagtgagctaggagcacttacacaagagggtcttagccactgtgtcgggggaatagccttatatcaaagactgaagccttttagtaaaacctgaagaataatcagaagcagcattgactagtctctaaccttggttgagggacacacacacacacacacacacacacacacacacacacggctctgaaagctcagacacggaggacacgctgtgatccacttagccctctcttctccttcagggggtcccttgcaggacagaacgctaaggaacaaagtcttaactggcaagctgccggcagaaggagactgtctggtggattgcagcgctgattaggaacggggagtcctttgcgtttcagaatccggtccacattttgctgagagcccaggcactgtgaataagaggagcctctgaggactggtttctgatgtcgcactaggcatgataagaatgccattgacgtcagcagagtcatcatcagggagaatggcaccccagctcttgaaaccacaccaagcaattgcagtgcttttgaaaattaaaagccggtgctggagtgtggggggtgaggtggggggtgggggggtggggagggaaagaagcaaagagggaagtcgtggctccagctgaactcttctttcttctatgcgtttcctgtattttaaaaaggcaggctcacggccctcctgtgcacacgcccgctcactcacacacactgctgcctgggctcattaacctaaattgggggaggtgggggaagaagaaagagagaaagaaggaaaaaaattaattctgttaacacttctgcatgcacataaaacaaactgtgccacccaggtgctggacagaggccctgagccacataagcctctgagaatcaaattgctgaggtaaaactgatatgctttaaatgtgtgttgatgaagagattacaagggaggaattaaacacttcaaaggagctactacaaagcaacaatcactcttcccccatccctcacacacgcacattactgtggacgcttgcatgtttgtgtgtctgcctgagaaaatggcaaagttggtttaggaagggaacactgcaggcatgttgtgatttcagctttcacaggcagctccaagaacatcacctccagctataattcaacggttacctggactggaaaatgtcttggaggttacgaagtctttgaattctttagtgtaaattgtctccgctttgaaattccacaattgatcgaatcctttcattctctttcccactcctaattgttccactctaactctccacccaccgccaggaatatgaaaacaacatagagtagaactgatgatatcagctgtataacacgctttattttacggcattaatgggcagctttccaagtccataaaaatcttttgctgatctgattttaatatccatattcttcagttatactagaaagaatgatttccgagatgtggaaatgttagccgggaaacaaaaggacataggcacataaagcaaaatctggcaggaaatgtgggtttaataaattgaattatgtgaaactcctatttcaaatggactgatactagaggagcagccctcgagagatatgcacagtaatgattcttcgttttcaaagacctgtttctttttgaaaaggaagaagccctgaacagcattcctttcaaatacacaaaggtagctaaagtacaaccttctcctctttcctatttgttctttaaaaaattgtaaaaattatattaagtgtgcttcttgtgatagagtcaataaagggagaaggagtttagcaaagcacatttactatatactcttaacccgtcttgcttactgtaataatcgaaagaaagatggctaattgtcttgcaggaatttgggttatcctctgaaaggatacaagtaaatttgtaacttgggtcgtattggctattttttgttctcttttgctttcatttttgttttgtctgaggtttataaatggaacccttctttcctttcttccttttttccttccttccttcttcccttccttttttcctttcttccttgctttctctctctctctctctctctctttttttttttttacaattgtacttaaaagaataaaggattctgaaaatcagttccaggatccaataagggcctagattgtatatcacaggatcagagccccttgctctcaaatttatgattgtgaggatgtattattgtatttgggggatcaataagcagagccagagccttcacacaaggctccttgtgccccctcccccgctccatcccatgaggttaaaaagcactgactttgactttaacactgtgaacaaaatacagaacaactgtttcaattcccttcactatttctgctatgtgcctagattagatgttttctgacctgtctccctaagttgttcctgtcacttgtgtctgtcattcgctcccccatcgcatcctgcccaaccctccctgtctatgattcgaattgctctctgtccagatcatttcctgcagtgaaaaacgaagaaagactttctcccttcttcccacctacacattccttttgtcccccaagatatcccttcctcttgcctggaatcttcccaggccttaattgattgatttaggccccctttgcaccaggcaccctagcggaagcccagaaagccccaagagtctggatgtgttttggagagcaggctcaggttcactgcacactaatttgcagcaggaagtgctaggaagcccgatgagggatgggaattagcaaataaggttggcagtcaattgacagaggaagcttaaggaagaggatcattttgaaaaggaaaaataatttaatccttttcaggtgtgttaatttctttcgtggaccaaattaccatggacctggaatagttgagattttccctaaggtctggctgtacttcatagggaagaagcaagggtaagtgcagtaaatttgattatggacaccagtctaactctagcttaatgagccatggaaacaaaatagctcaatctcttctaactgctgtaatgcaacactaggagcattgagagcactgtggttttggttacacaaatttgtagtacaggccttgcctcagcatttgaacatttcagcaagagagctgaacttgcttcgttcttcatgtagcagatataagtcttttggaattaatttgaaaaaaaaagaaaagaaaagaaaagaaatgtacccagaaagcaagagatcttaaatgtatccaaaacctagaacaaacaaacattaacatttgccataattactgtgggtgtttttaataaaaatatatagatagataattttggaggttgcatttccccaccatcactgccagcctcatttttcttccatcctctccagaacaacctctgccataaatttaggaaatagtcaacctgttcacattttcatctttttactatatatgttcttattcacaaacgaatatgttgtagttataaaaagtcatcagtatcttttagcttatttttttaaatgcaacattatgtttgttggatcattttactcttgtcccagtgcaccctgtaattcccatgaattgacaggtagcgatagatcagcagtagtaaagtaactgatatgggtaggttaatagaatgacccttttaagaagggatctcaaagagggaggctaggtaagctacaaaattatcagggcgaaatgcagtgaggtagaagtgaaagcagcttagagtcagcctgggctaagataaatgaggagtggagctgcagctggaggagcaagagaatatggtctactcgagtataaatcaagcttgctggtgagcagtttaggactagctcctggttttacagcaagactttttatgtgatcttgaccaaaccactgcacttgattgctcctttctactccttggtcctcacgtgtcaaataaaacccctgaattgcagagccaaaatgcaaacaaatagaactcctcactcaacctccctcagtttataagtaaggaaatgaagacctagtaaaacattataacttacagatacctgtcagggcagaaccagaagctggacttgggctaggaaaagttgttcccccctgattacattttccaaaggttataccttttccacagtttctaaggtaacatgttgattgacttgacagttgtagaaatattaggaagtggtataaagccaagaccatgtttactaaacagtgctgctcttttttttacatcatacagatgagaaagctggtgctcagggaatttaagcaacttgcccagagtcacgtagcttagaagtgttagagccaagatktggaccccagtctttctcactttcacagacttgcttttaaccactgtgttatgctatgctgcctcagtataagctcctttcaaacaaaccacttccagtctctgacatgcaagcccagaagttttcagatttacaatggcatactttttttctatctgctaagtgttagatgtcacggtgtctgcaatggagtagagctttagaaatgaggataaaacatttggtttgatgttagtattaagaactccaatatccaaggcaggaaacttggtaattaatattttaaatggactggaggggtcacaggtattaaaatcaatattttgatggcaagataacaatgtaggaacaaataattggagatgtttagcaaaattatgaattaagtagatgtataaacggcagattatgaaagggaaacaaagattacctgggaagagttttgtgttttagtcaactgaattaccagaatgggcagaaaaaggaagtatcaaagaagggtctgctgatagaaaattaaataaagaagaagatgccatggaaacgtttttagtgcaaatacactattgctcatggctgaagacagaaagaagactatgtgtgacttccagatgaagttcaggcatagaggcagggctaaataaacaagcacatagacccgagaattctcgttgattgatctttggaaattcggtataaatatgatcagttcaaccatgccttagctactggatcaaaggagacatctaccggctttgggagataggaatctggaaaattgacagactgaaaaaaccaaaaccaaagaaaaaaaaaaacaaaaaaaacagagaatgcagaatgccattttaaaaaccctaagaggctgtgtctgatgttacaggactctttgactccattagtctcaattctaatatttaagttaagtgattgtgggcatagaatttttttcaaaacctgtttcgaaatgaaggcttcccatacattgaagttaaaagtggtcttgagaaaagaacttcttaataggtaaggggttttactttggaatgttgaaaatgtttggaactagatagaggtggtggttgcacaacattgtaaatgtgctaaatgccactgaattcttgactttactatttttaagtttatgtgatatgaatttcacttcagtaaattatctttgttggtgcataattactgtatatatttatggggttcatgtgatgttttgttacatacacaatatgtataatgatggaatcggggtatttacggtatccatcacctcaagtatttatcatgcctgtgtgtcctctttctagctattttgaaatatgcaatacctgttgttaactctagtcacctaatctgctatggaacattagagcttattctatctgtgtgtttgcacccattaatcaatctcttcatcccctcccctcccacctacacactcctcccaggctctggtatctatcggtctaccttcatgagttcaagttttttagcccctgcatatgtgagaacatgtgatatttatctttctgtgcccagtttatttcacttaacataaagatctccagttccatccatgttgctgtaaatgacgattttattcttttttatggctgaatcatattccattgtgtataccatgttttctttctttcttcctttctttcttgctttttttttttttttttttttttttgagatagagtcttgctctgtcatccaggctggagtgcaatggtgccatctcagctcactgcaacctccgcctcccgggttcaagcaattcttctgcctcagcctcccaagtagctgggactacaggcgagtgccaccatgcccggctaatttttgtattttaagaagagatggggtttcaccatattggccaggctggtctggatctcctgaccacgtgatccgcccgtctcggcctccaaaagtgctgggattgcaggcataagccactgtgcctggccgtataccacattttctttatccattcatctgttgagggacccttaggttgattctccatctttgctattctgtatagtgctgcaataaacttggggatgtaggtatctctttgatacaccaatttcttttcctttggataaatacccagtagtgagattgccggacatagtggttagttctatttttagttttttgagaaatctccatgctggttttcatagtggctgtactaatttacattcccactggtgatatgtaagagttcccttttctctgcatcctagccagcatctgttattttttttttattttttattattttttgcatttttaataatagccctctaactggggtaagatgatatctcattgtggtatcaatttgcatttccttgattattagtgatgttgagcattttttcatattggacatttgtatgtcttcttttgagaaatgcctatttatgtcctttgtccacttttaatgggattgtgtgcttttttactattgagacgtttgagttcctaatatattctgaatattattcccttgtcagatgagtagtttgcaaatattttctcccatttaatagattgtctcttcactctcttgattgtttgctttgctgtgctatacagaaatttttagttcaatacagccccatttatctatttttggtcgtgtggcctgtgcttttgaggttttagccataaaatctttgcctagaccaatgtcctgaagtgtttcttctgtgttttcttctagcagttttatgtttaagtctttaatccatcttgagttgatttttgtatggtgagagataggggtctactttcattcttctgcttatgggtgtccagtttttccagcatcatttattgaagagatctcctttccctaatgtatattcttggtgcctttatagaaaatcaaatgtatctatcattatgctctctgtctactctaaatctatcagtccactctgtaaaaatgtggatttgtttccaggctctctgtattattccattggtctatgtgtctgtttttataccatgttgcttttgttactatagcgttgtaacatatcttgaagtcaggtagtgtgatatattcagctttgttctttttgctcaggattgctttggttagttgtgctttttttttggttccatagaaattttaagtttttttttatttctgtgaaaaatgacattggttttgatagggattgcattgaatctgtagattgctttgagcagtacaataatttttttttttaaagagaaagggagaaagaattgggcactaagtacatcagagtagatgtttatcaatttttttaaaaatggtcttggctaccataaactgtgatgttcttgagagcttacattgtgtcttgttgattttggaattgttgatactcaaagtgcctgacacatagacttgattcatatgtatttaatcaatgaatgaatggataactctgacctcctcttagtgaagtgcacgtcatggggctaccacttgactatatgctgtgggatagatcaaagaaaggtaggacacaaccttgaacaaaattaaagtaaccttcagcttgtttataaaaagtgttctggtggagaaataatgaatcttttcagattttagagtgttgctgatttgatttcaatttgcatttttaaccatcagtctctgtggaactttagtttataggtaggacttttgattgagcttggtggctcacacctgtaatcctggtgcttcgggaggccgatgtaggaggatcacttaaggccaggagtttgagaccagcctggggaacagactctactaagaataaaaaaattagccaagcagagtagtgcatgtctgcagtcccaactacttgggaggctgagcctggaggatcccttgagcccaggagtttgaggttacaatgagccatgatcccaccactgcacactggcctatgcagcagaacaagaccccatctcaaaaagcaatgacacacagaaaaagcagaattttaatttgttctgctcttgtctctagcacttcatatccatttctctgaatatgaacagtgggaaaggtagtggaattgaaatggatcatagaatgtttcctctactgataatttttactccatttggagtatgattgaagagctaatgtcaagatgcacagcaggactcaatgattgaaaaatagtgttactgatgtaaaagtcaccatattttaagctttctttatgatagtcttccattatttcctttgtcatattagcaccactggaaaaacacaagttatacgtagggtagaaaatgtaatgacaatttggtgttttataaacaataataaatcagctttcatgaaattaggctatgtcctctgctctggtgttagaacttacttttgcctgagctcactaaataattatttcaatttcccagataaatgtacttctgtggacagaggccatatgctggtagcccctatacaatatatagagagcataaatttcctcttctctcttggtatttaaaattaggatttttataaaatgcattttattcttattttgccttctccatcattagaaagattcctggatctgtaaaccaaaaataatagtaataataatgataataagattttggcaatttaaagagaaattcactttcgtgaatatggtcacgccagctatcttttgaaccttaaaggaggcaggaagaacatttgaattaagaattttggagtattacaacctcatttggttctcagaagctttttttaatttcatcttctccacgccagtttatacaattctctcatgcctcactttacttttatatcttttcttaaaaacagtttaaattgtatcctccccaccccactttatacaattctctcatgccttactttacttttatattttttcctccattcttccttgtttcattcattcactctcccaagtcctctggcctaagttttatttgtgtggtattaagcagagaccaacagaacaactgtgaagacttcttggggataaaccaggtttcacttgaattgtggtgcgtctgccattggtgtggaagcagggcagaaagaggacagaggcataccagcaagtacagacatctaaacacaaagagaggagaacaacctcagggatactccctcagtgcctgggaagaaagcaaaacttaaagtgctcatagaattgtaaataaactctctcctctttgaaatttatgttcgatggttgctgtgtagttgcaacagtgtcataaagtccatgaggcctattttttttgagtaatcaatattgtggaaaagtgctagagcagacctaccttatataaattaatttgtttgaattgctctattcactatgaataaatatttattggagtaccttctatatgctggggacctcagccatgagatacgcaggtggaaaaaataacacttaagcagcttattgtatagcagagaggtggttgaattgatagacaattaaaatacaacgtgttgaaaggcctgttaaagccacagggtcactcagtggcaggagggattcagtcagcctgggccagccatggcaagtaagtggcctttggaaagttaccaaggtaagacatacctgatacgttcaagaaacaattccaaggttcaataaggccagaagttaaagggcaatgtaagccctggaaactgaggctagaaaggtagaaggatctctttttaccacacactgtgccgggcaccatgaagaatacaaaatagctagctattatggagcctacactttaatgtgtgtacatagatacatgtccatgttggaatttaactccttgagaggtcatgaattacttagtcccggaagcatttgaatttatactggaaagctatagtagagagttgacaaaatattttaaatgtagtaagaagaatttgacaatctattgtgtggtatgctagcaagccagttctccttcctccttttctcaccatcccaccacccctcacaaaawaaaaaaaaaaagttaaaaacctgatctgcagtgtttgtctatggccatggtgcaaatactcctcccatggctggttccaagctaccactggttcaacagttcttttgcagaattcttgaatctttaacacttaacaagatccagttccagcatattcctgcaacagcgattctgcagttctcaatgtcaaataatagaaccaaaaagtcatataagtactacaaagaagaagagagagttgagagccagcttagccaggaaatgctccagggggaagtaaggcttgagttgggacttatagataagaaatgtaaataaaaaggaacaaacactcccaccgtgatgcacaaatattggatcatgtatgtgtgtgacaagtgtggccgtctgtagtggagggtccaggtaaaatttaggccatgaaagccttggtctgtcaaactaatacattttgttacattaaagttagtagacagccattaatggtttttaaaaacagatggtcatagcaatgttttgacaaaagcaatttttaaggaagattttgtttttataaaaagttgaattattgatagcagtgagaccccagaatagaataagagacctgcctcatgtaagtgagagtaattcaattcagcagtaatcttggaaatttgtaacttctgtggtgagaaattgtatcctgggatgttgggtaaagccactgtgaagccaaagaaattagtggctaaacgtagagaaattaagatgaaggaactggcacatggagccactgtgtactataaagtatttttattggtatttagtcttgctgttattgttgctaatgattgtattgaataattaccagctgttgttagttatttgaaattaggtgcctaaagcaacctctcatcttgcagaaagtcatctttcttgaaactttttaaaaacttgcttgaaacatggagacttggaatgggacgtctatcatagtagcacatctgaaatccttctcattcctgctgtcatttctgtcctttcgcagtccactttgtcaccacccccaccattccttgttctgcctgcaatccagctttccagtcactttctctacttcttgcctggctgcagcgtcatcatttaaacagctctgggttggtatctcctttcaccagaattcctgcagccgtggagtacgtgcagagcatcttccttttgaccctcttaaaatgctgaggggtgtttccgacacacattgctttgtaattcaataatagggcagttgtgggttctttttattgcagttatgctgatttttaaaagcactctgagtaagaaaggaaaggtagtaaaatatacgtgtacctcgatgctcattgatcacgtttgcacatgttcttgccaaatgttgtttttaaaacctgtctctgcaggtctgagctgtgaaagtttgggaaatcagggtcagaaggcaaaaaaaattcgtttgtatcatcgtcatacaatataaattacatgtagcatatacatagaaaacaatccaagggatgagcttcctggaaatcattccttcttgtttactctgattatataatggggaattgtatgctttatacaattttaatttcttgaatatatgtgctcaaaaaacattataatgtggttcagtactatatatgctgaaaacaggttgctaatgaatttggacaaagattcccattttatttcctgtacgtttacacattttttggctgtatattatatttactatatatatttattaggactacagcaaacgctaattcatcgactgagataagaaatgtgttttccattaataattataaatctgccagaagattgtgagatttacattgttggggatctaaacaaccaaaatcattgcaaagttattttaaaactattattaattatttatgtaatcatagattatggcttgcagaagactgaagaaattgttcaacaaaccatgtaggttttgtggaagagcagtagactttgataagtaagctcagagtggtccattaaccttttctctatatgtacattatgtgttgataagcatgatatctattatacctcaattattaataacaatatacatcctaactattaagaacttagcctgcaaccctaatagtgtcccctttcttctagaacatagatcagcataaggaaggaagcaaaggaggtctctaagcactcaaaatagatgttcacaatgttcactcactgaagataatgtaggtcattagccagagaaatgtatgttcatattttagtgatgattcatacaagcttggtcatgtggttctaaaccttctataattggatgaagcaaattaagaaaggctgggtaggagatttcagggaaagtcacaactgatattagccaaatgtcagctgatggcctgaaaacaacaacagaaaaagaaaatctacaaaatcatttgaaaaccacagacatagctatttggggcctttttgaaaggggcaataagctcaacccatctttggaaacactgagcgcatcctgtctggacaactgagtataatttttggtgttcaaactgatgaccccaaatcatcaaaaaatacaaaattatattttgctcaatctgtattgctcttctatattatggtaagatttctgtttagtgcacttaaaagtaagactacccccaaatttaatccccatccccttcaatgtctcctcctggacattgctccatctatcgccccttctccctctttctttgacctactctttgatggctgcatctccttcaaaactggttgaagttcctaaggaaaaaattcccttcctctttgatcctgtatcttccatcagttattaccacatatctctattgattttcgcacccaaacttctagaaagtttacacttatcattttctttttcttttccccccacttattcctctacccccttgaagttagcttgcagccccaccactctgttgcaactactgctgtagttcctctgctctcccaattgccaaaccaagtagatatttttcagttcatttctcatcaagtttctctaagtcaattgccagtgtatccctctcaaaaacctttccatctttgcatgaggtcgtacactctttcttttcctttccccccacccttcctttgacctggggttcccaggatcccattctccattcctgctttcctcactctgtgtgtcttccaagactgacttgtgcattcttattttaattaccacctgtttgctgaaagcccctaaatttatatagaaatccatcttaacctcttctgcaaagcttggaaccccaatatttattggaaattcccaactgagtatcccatgggtttataaaattcttcatatccaaaaccaaatttagcttttcctctaaatttgtgcctccttatatatctcagttggtgacactacccagctatcatgttcagaaaataaaataaaaatacgtcataaaagcatcaaaactctataaatttatccatgtaaggattgccaccattaatatatactttaaatccttccaaatgtttgtatacttgtatatatttaaagggatcatatttggtgacttactgctataacacatttttcccatttaacaaaaaaaaaatttttctgcatcaaagtatacttcaaaattatttttgtagttgctcatgttctagcagttatttaactaataatgttaaacatttacatcatctttgcaactttatttctcttgttgcttttttcttaagaaatgactattgaaaatgacccccaaaagggtatataatatcagtgataaaaattagctcttggaaagggaggagagaattttctagtgtatggtagtagcagtaacagtggcctagttacactcaatatctcaatatgtaatgccatttatggacagcttactatgtgccacactctttaaggactttgcataatcctcaccacaaatctgtgagattggatacattattgttcttatttcatagttgtggaaactgaggcccggaggagtgaaatactaggccagggtcacacaagtagtaagaaacagagccaggagtccacctttggcagtctgtttccaagattggtcacctaacacaatgcttatctgccttttgttgtaccctagggcatcctttctaccagagtgtaccacttcgctttatgtttcttagaataaaaccaataaatagtgcagttagttagctaagttttcagaaattttgatagatagtgtctagagaaacaaaaaagacacaatttctaagatgtagtaatgaatgtttcattcatgtcggtgattattttgatttgttgatgtgtttttgataacagagtaggcaaaaaacataccatcaatttaataatggaatcctaagtttaggtttaacatgatttttgaagaagaatcaatgtgcaaatgttgatgtattttcagagttatggttcagaaatgtgaattattcaaatctcatatcagaatctaaatttttaagaaaggaataatagaatatagtaggtcccctaccatcaattctacttctgtacccctattttatcattcatatttggcttgctagtgaagatgccttgtatctgttgtatcactgggtataatgtctggcatttgcaggtgtgcatgcaaggaaggaaagaaggaagtgagggaaggtggaaggaagagaacaaggagggaagaagggaagggtagacactttgggaggccaaggcggttggatcacctgaggttgggagtttgagaccagcctgaccaacatggagaaaccccatcgctactaaaaatacaaaaattagccatgcgtggtggtgcatgcctgtaatcccagctactcaggaggctgaggcaggagaatcgcttaaatctgggaggcagaggttgtggtgagctgagatcgcgccactgcactccagcctgggcaacaagagcgaaactctgtctcaaaaaaaaaaaaaagaaagaaaaaggaagagaaaaagaaaaaaggaagggaagggtagaaagaagagaggaaggaagggagggagggttgaattatagatttccccaactgcctcccacacaatgtgctctaaccataaattcttcatctcagttgctcaggccaaagcttgagaatatccctgtgtctactctttttagaacatctcgtatctaatacattagaactcctgaagcctctgctctcaaaatatacccagagcccagcatccttgtcaccatctccatggttaccatcctattgcaagccaccatcttctctggcttggatgattgcagtggctgtctaataggagaccctgcatctcctcttgctgcataacagtctattcaaaagacagcagtcagtgcaaatcatgtcattcctctgctcataaccttgcaatggctcccatttccctcagagttaaaagtgattattgtggcccacaacgtgtagcccaatttgacccctgtttcatctctggtcttctttttaactcttctttctctcattcactcagctccagcccattagcctccttgctgatcttcaagcacatcagtcacacttccattttaagaccttggtgctgcatgaagtgctctttcccccggtatcttagggccaattccattgctttaagtctttgcttgtgtttcatctccattaggccatccatgaccatcccattttttaaatgcatcgcacattaataccattcccaatgtctgctctattgtatgtatgagtgcttgtttcatagcatgtctatccttctaacacataatttactatatctattgtttattatctctctcctgtactagactggaaactaccatgtggaacaatcttcgcctattttgttcactgatacagatatatatacacaacagtgcctcagccatgctaggttgctcagtacattcttgaataaatgaattatcgatgtactcagttctgttacacagatgatttggcttctttggtttcccattaagagccttgttttctttgccaaataattgaaagtttcactcagaagataaggaacatcaaagacctcaagctttgtggtcttggaaagctgtggctttggtctctgtctcattccccttgggatttagaatagaaaaatgcaggtggagaacacattcaaacatcccacactttatcagtattttaaaagaaagaaagtatggctttttttttctcaaaacaatgtcttagttataaactgaatttgtataaatggccagttgtacattagggcagttgcacaatagaaagcatccagggaacaatcataacctcaagagcctattggaaagtgggatcctaaatagctttctatgatctccctagaaaactgtagaatttccccagagaataagccagcattttgttgaccattctgcaattccaggatcatgcttgcatagtcatagcttggaaggaggcaaattgaaacaagttgaaaatctgcaggaactatccccagtgagaccacagaaaagccagaagaagaaaaggtgggatttggggtagagaacgagccacttctcactagtttgcatgaagcattgaatatcccaagggagaaaacattgaagttctatgagacaccaagaaaagtgtatagattatcacagcatatggatagaggtcatttgttccctccctccctttaaagaaaagtagctttgcaagccacagtttaggaacaaatggactttttgacatagttcaaatcctcctgggtgtggaggcattgacaggagcaatgtcataaattggttaaaggttgcagtctggaatcaggctgccctgaatcccagccctgccatttactagctgtgagaccttgtgcttcctaacctcagttttcttttcttttcttttttgagactgggtctagctctgatgcccagtctggggtgtagtggcaccatctcagctcactgcagcctctgcctcctggactcaagcgatcttcccacctctgcctctcaagtagctgggactacaggcatgcaccaccatgcctggctaatttttgtatcttttgtaaagatcgggtctcgccatgacacttaggctagtctcaaactcctaggctcaagtgatccacctgcttcagcctcccaaaatgctgggattacaggcatgagccacggtgctcaactaacctcagttttcataatggtaaaataggaataccgatagcacctcccttggtataaggattaaataagataatctacatagtgcttgaaacaatgcctaggcagtgttcatcaacagttagctgtgtgctgtgtacatgctggagctgctaccttgtagaaattttaaatttaaaatggtgtgtagttggaggttaggagttactaggggtatcgcctagggaaagacagttggttacccagacaggtccttacagagtagtgttttccctggagaattaactatattccagaatctgtcctcaaccaagcagtctcagaaaggtgatcttgtcacagcctctgagtaagctgattcaaactctcaaaagctcacaagagccttaaagccagagtatcagctgattccttaaaagctacaaagtgttttggccttgccaacatacgcattctccctcttatgggtaggtttagaatgctaaatagtacataacatggatttagaatagacagatttacatatgatcagaaggctcagtggtcatagttttgagggcctaggacatgcatgtgagcagtagggagatcatcacaggaggatgggcacactctcgaggctcatacaggcgctccctctctccatgggcagcacaaggcaagtctcctttgtctttgatttacttgccaaccaccctcattctaatgggaactttctttttccaaatatgttaacaccttcaagtaattactgtcagcgtccagcctgggagtctcttggacacagtttttcataactctagatggatctcataatttgcccctgaaagatggtaaataattttacttctcttacttctggactctaagggggatacttcactcttgctccttgacctctcctctctagatcccacaagccaaaaattgttggaaaggattaatatgagctgggcccaataggctacagcatgcaccagcccctaaagccagctttaggattgggcggagtgtcagcccagcttccaccccacttggcttattcagcgacctcctgcaattgtcctctgctagcccttggcagatcagaaatgttctaaagattgacctctattactttgggctttccttaacttggcatccatgaaaagatccacttaaatgctccagattcagtgaagtctccttatcagagcttcttatagcacccatacttttctttctcagcatttattatgaatgtaatcaaatcatactttgtgcatgttttgttgtggttgctgtttaatgactattttgtccatgaaagaaggaactgtgtttgttttatcactggtttatccaagggactagaacaatgtatggcacatacaggatttaacgaattttttttaatgattaatgcccctttagatagtgtttttcatctgagtgcctcaacttctatgtgcattatgaaactgatatagtgggtcacaactatcagtaagaaaaaaagaactggaatagagtagaaaaagatgagaatgtatcacgcatagggaataacttttataaatctgtttcagtatggataggcaggcctacaccacacacacacacacacacacacacacacacacacacacacacacacattgagttcctatgaatttgttttttttaatttctttcttttttttttttgagaaggaatctcactctgtcacccaggctggagtgcagtggtgcgatctccactcactactgcaacctctgcctccctggttcaagtgattctcctgcctcagactcccgagtagctgagattacaggcacctgccaccatgcctggctaattttttgtcgttgttgtatttttagtagagatggggttttgccatgttggccaggctggtctagaactcctgacctcaagtgatcggcccgccttggcctctcaaaatgctgggactacgggcgtgagccaccgcacctggccaatattttttaaggtaagaattttgagaaacactgtcctaggttccctctaaaaccgaagatatcaccctatgttcagccttttagccctaatccttttcttaatcttccctatgaccaaatattaccatgcacacatgcacacacatacacacatgtgtgcacatacacatgtacactaatccatctaaagtgctactgttaaggaggagcaatagaagaggtgattcagggaatggtttttgatggttatttacttttataatagtttttatttgtaaaaagaagaaacctagagttttgtatcctaaacaaaatttaggattaggatacaaaataataaaattcaaaataagtcttgactagtgagtgtagaaggacagtgctacatctgaatctccagttgggtttacgcattttgtatttatcaaaaggcagtagtgatttaaaatgttgataaacactcagtttcagttttctattgctgcaaacaaactattccagaaagtgatgtcttgaaacacaaccattctattttgcagtctgtgctgggctcagccgggcagtcctgctggtcttacccatggtccccaatatggctgcagtcactccagtagactggaggctgggcttagctgagatgacctgctttctttctttcttcatgtagtctcatggcttttctctctctccatgtggattcctcatgtgaactctccagcaaggtagtcagaatttcttccctggcaactcagggctgccaagaacacaaaagccaggctttcttaatgtttaagcccagaactggcatgtggccaattttttgtgttctgttggttaaagcaaaccgagtcaagaagagcctacacaagtagtaatattacaagtatgatgaaatatcattctcttcttagaccaaacagcatattcctccctccactcttaccctctataatgttttgcttttgggagttcctttatatgaaatgcctcccctctacttctccttctactgaaatcctactcatcctgaatccagctcagagctaactcagtgatttccttcatacatctctattatctcatcctggaaataatcactcctgccaggtgcagtggctcatgcctgtaatcccagcactttgggaggctgagacaggcagatcactgaaggttgggagttcgagaccagcctggccaacatgatgaaaccccgtctctactaaaaatgcaaaaattagccagacatggtggtgaatgcctgtaatcttagttacttggcaggctgaggcaggagaatcacttgcacctgggaggcggatgttgcgagccaagatcgtgccactgcactccagcctggatgacagagcaagactccagctcaaacaaaaaaaagaaaaaagaaaaagaaaaatgccctcagcactctcatagcattatgtctatatttcatattatgtcttgacatataactttacacacacacacaagcacacacacacacagatgtagcttgcttttagattttaagttgcttatctaagattgggtgatcaataactgtttttttcaaaaaacattaactggttttctatgacttttaaatgacagctctaaataattataatttctcactagtttaaaaaggcaggtggtgggatattcaaaactattggagaaaaaaagctgatgtatgctaccagcataaaacaacaattgccctttacatcttcagaaacccctgtactgtgcagtcattttcaaacctggatttttgtcttgtgttttttccaaagtagtatatatttaactttgtaaaatggtgtggtgttttttggttgttgttgtttttgagatggagtttcattcttgtaccccaggctggagtgcaatggcgcgatctcagctcaccgcaaactccgcctcccgggttcaagcgattctccttcctcagcctcctgagtagctgggattacagtcatgcgccaccacgcccggctgattttgcatttttagcagaggcagggtttcaccatgttggtcaggctggtcttgaactcctgacctcatgatccaactgcctcggcctcccaaagtgctgggattacaagcatgagtcaccacgcccggcctaacatggtggtttttttcctacctaatatgaagatacttaatgtcttaccttggaaaaatatacatttcaaccagtttatattttacagaagtgactgagaaatcataagcctttgtgcaataacatcatcagtcaaacacataagcagattctaatctgccctctctatcaattagtcttaaaactacaagttgttcctctataccagctacacatgtgcattggtagtcttaaattgtgatatgagcccttaggtagttcacacctttccaaaggaagctcagtgaacttcctgaaactgtgtaaagaattgtgtgtgcagtatgtgcatgtacattatctgtatttttctgggtggatgatccagtatcctcatcagagtcttaagtttgagaaacccaattatatattagttgtaaatctgtttactttcttagaattcttctcacattaaaactaagattatatttctatttcataggtaaccaatttcttctggagcaactggacacttacacgaacacttccatctgtctttcatctttacattttatttctaggtattactagtgttaggtcacactccctcctatggggagattctctatcacatctctagaacttcaccaatgcaagccttcttaaattgacccactcgctactgagtctgacccctgggccagtcacatcggtgcttgttagaaatcagaatcttggaactaaatcagaatctgcaatttaacaagatttctaggagtttccacagcatatttaaagcttaagaagcacaaagctggtgcatctaataccccactttctgctttttaatcttgcaggatttatgttttaaattctttataatactattaacaattatcatttgatttctattttcatatcatctgacagttttgattaaatcctttaacctcaggatttgtaaggggtaaggggagtgggttaactaactgatctgattatcaaataatgctaccattcaggacttatgcatagtttctgtgattctcaatagaatttgatggtacctacaacctctactccttgttttagtgtctatgtttttccactgtgcttaaaaacatttaaagggagaggctggaaaattattttaagatgaatactataaatgaaataactaagattagaaaaggcaatgataatactgaattacattggaaaaattcagtttacaaaactctgaaaagttcctaaggcagaattttgctgccccggtttctcataatagacccagcagttctaagttaagcacacatctttttggctatatggtgtatataccagactatcctttttctccaaaatttgactttcatctcaaagagtttaaggaatttgtgacttggtgcgtttgatgtggcacagttccacatgtgagggatggtgatttggatagcacgacagaagtacgtgccaagaataattggcttctgtcttgcggaacagctcaaatactatgtgtatcacagtatgtaatttgggtgtacaaaatgcctgtagttcaaagtgctttactcctctgcagtggcaagctgagcttcctgttggctgattccttatgtttgcagtaaacaggctgggtgcagttagaaagaaagcatccatctagtaagtgcattcacatcatccttcaaatgccataggccttagctccaggacattttctgcctgtctccttccctccctcctttctttcttttcctctctccttccctctttcctttgttccttctttcctccctccccttccctccttttcttcctagttccccctttctttcctttcttctattgaataaaacgcaaagtaattctttttctacttactttgattcttatcagctttcttaagcagtttccttgccgctgttgtgaattacatggggctgtggtaaaatgtggcacatttcaaggctatgtatccctttagattctggttcagtaagcttggaaataaataggagagcttacgcttttaactactagcctgcgattcgtataatcatgttagtttgagaaacactacagtaatcacacatgtaagggctttggagtaagatggaccttggttatccaacgcttactgtgtgactttggtaaattacctaaacttttctagccttggattttaatgtgtaaaagatagataatactaactcagtaattctttatgggttccatgagacaatgtatttaaagcacccagcatactatctggttcatagtttacagtcaataaatgttaattccattatttgatcacaatgtaagactattgaggtttaattttgattgttttttcaaaagtttgtaatctgttaggaacaatttctaaagtaaaattcagaaaacaaaaccatcaaaatttaattcagctaacatttttgaggttctatatagtctcgaacatatattatctaattcgattatcactataaaccctgtgtatagtagatattatcattcccattagtggatatgcaaaccacggctgtgggatagttttacatttagtaagtggcagatccaagtctagacagcccaggctggttctctttatactctgcctggcaacatttgccttcatcactgtctgttttcaaaagtaactaacctctacatccctgctcacacatacaaatagctctaaaggtacaaaataaagctaattttctgagcaattcattttattcaaatcagtctaatgatctgttccatgaaaaatgattatgtagctcaaaggtcttcaaactcgtctcaaaccaggggtcaggcagatcatattcacataaagggagaagcttgccagccagaagtcaataaagattcctgggactggggtgacctggaagctacaacctgtttaaaggagacagcttctgcctagctccaggctagtgctcaagtgccaggatgtgggctccctattgtcaaatcttttttttttttgcttttttaagactggaagaaatccaatatttaatgcgaaacttcccatttttgaacaacgtgtgtgggccaaacaagtcacatctgtggaccagatctggcctgaggattgccagtttgcaatcttgacctaattgcccttaattcttcacttctcttgacctggtaaatactccatttaaatgagtattaggtatgttctgggcccttttggactgggtctttgtaatatatacaaatttcaaagactgacctttagtttttcaggttcagaattgattttctcagaacccaattagatcaggtgctgtcactgacactcagaactcatgaactttatgcaagagcaagaacatgaattagggaattcacagtgagaaatatattgacaagtagacaggataccatattggccagatcagttcattctgtccttgtagttcagccccttgagaaacaaacttctaattagaagctgctttgacatatatggagtcagaaactaggaactgtagactttaaagggctttcctgcattgggttttgagattcttcctccttttatggtagtcttaacattcggctgttaagtgttatgctccccctccccaggcatgccaagtatatactgaccaagtgtcttctttatttagctaccatatgagtggttctcaaacccatgcccttgttaaaacacagattacagagccctatgccccacaaattctgattcagtacttctggggtgggtcctgagaattttccttcttataagttcccaagtgatgctgatgctgatgaactgctggatggggaaccccctttgagaagcactgggttcctctatcatcttcagctgacaggctttttcccctttgaagggttaccgctattgtctgtgtctctgctttaatatgctaatatagcattatggtcatatccagatcctgaggttggaacctgggtcttagaacaatttttaaattgtttatatttttaaaggtatttgatttattaaaactatttgattactttatttcatcaagtccaaggtgccattgattataaaaacatgtctggattttagaggcattaaaaatgtaggggccaggcgcgatggctcatgcctgtaaccccagcactttgggaggccgaggcgtgcagatcacctgaggtcgggagtttgagaccagcctgaccaacatggagaaaccccatctctactaaaaataaaaaattagccaggagtagtggcacatgcctgtaatcccagctacttgggaggctgaggcaggagaatcgcttgaacccaagaggcggaggttgtggtaagccgagatcataccattgcactccagcctgggcaacaagagcaaaagtctgtctcaaaaaaaaaaaaaaaaaaaaaaagtagggaaaaaattaacagtttcagaggtactgcaaattagtaaataaagcctcagtttggggcagtctcccctggattatgttgtatgtgtgtagctcaactcgatgggcacagttgaaggaaggattccctggtatgtttgttaaacaaacataaggtgaattttaagcctcccttccccaattcttagtggaaaagacactactggtactgtgtcctatggctgactttgtcgtctaattgaaatatcttattattgtatgcatcctctcctacttaaatgtgaccctgaaatgccagatctttcctttggaatgaatcttttttgtcttattggactggtagggctatgcacttaaaaaaaaaaaaaagttgattattagactcactgtttccttggccagtcaggaaaagatatttaggacaagagtttctcaattgtcctcatccagttttgcctttatagtgaatttcaataaatattaccatgcctatgtaagagggtgactggagaggcagaaattctatctgactgtccacttctaactctactattggaaaacctgctaggggtttttgtatttattatttttggaaaaatcattaagtggattcccttagctatataaacataaggcctgtcatctttttctttggagaaagagtgtgacaaaatttcccccttcttattaaaagctacccctcctcttggtacagtttgaggatagcgtggaccaaactacctaagaattcaggagtctaccaggagaaaagagactttctcactttgtcccacaattagaagtactgaggaaacccatgagaatggatgaaaaagggcagtcccatggtgtattgtcgggagagaatgctgatacggcgggccctagagggattaatgtatctgtgtagaggaaggggaaacctaagctgcctgctcaagaagagcatcttagattgttgagtgagggctgatctttactaaatgagttaaatcaaagagccgaactcttggagtccaaggctgggcatggagacccaaaccagcaaggacacaggtctggacaggaccattgttcactgtgataccacatggcagtggcagaagccttcataccaattgccgtcctctctacacctgaagtttagaagcacgactctgctttagactgaataatccctgaggttcttgggttatttgaaagaggggtagttttcaaaaagagagatattagatttcctattgaaagggcagccctggtctccagtgattaactggaaaaacaaaagagatataacaatttttacatctaagtactgtgctagcttctgtggatctagaatcaaatgagacaagatgtagtatgacaagcagttagactctcaagaaaatcattcaagtctgtttaggaaaactgacattcattcattcagcaaactattgagtagctcctgtgcatcagaacctgtattcacagtcaactgaaataaacacaatttctacacgagtggagttttccaaatagactaagatgtcataatggactgtgtgtagagtaatgttcaagttttttttgtttaagcttccccatcccccagaaaatactggatatatatagcaaaacctttcatggataataattgacatataccttggaggccatttggaatctccataaacgaaagaagaaagggcatttcagacaaagggaactacatgtacaaagtcacaggcatgtagaaaaagatgaatgtttcggagtaacttacagtatgtagggcgcaaacagaggaaacggcaaggaataagactatgtgagaaagcaagttagggcgaccttattaaaaagtttatagacagtggcgcaccgccaaagatgtagaaatgtggcttgctgtgttctgtattttggagcaatcactcgggtaccctgtgttgtgagtaggggtgaaagaagagaatcagtggaaccatgggaagcagtttgggagataggttggaaaaatattggaatgttctaagcatgacattgtgaaagaatgctagaatctttttcatatgaggggtgttatggaaaataaagaaagtattggccctgccctcaagaagcttggaacataaaagaagtaaaacatgagagcagggcctaataatgtatctcaaagtgctgaaggaagcatatgcattatagaagttctcatcctggactgtggtttgttgagaatgcagctgggtggagtctgaggaagtaagtgatggccataatcgaagaagagataagaggtaagagcaatggcttaaaagcaaaaaagcctcaaaacattcaaacttcctttgtataatagtggatgttattttgagaatgtcagtttcaggagataccataatcatgtgtttgtctgtatttaaaaagccaccaccataaaagatctagagtcactcatgaagttcaagtaccaatttttacccatgagtgtggaacattctgctcttttacaaacagtaactcgtactgtcacattttgcggcgcatctctcattttgttggttatttagtggccatgtaaacatgtacatgacttgtggtgaatatggtgattctcactttataaccaaagagggtggatgttacagcatatgagcagttatgactgtaaagcctgaagtgtgagtcacagggtctgacccaggtagtaagatgtgttatttgttcatgttggttagctgaatttcctgggctgacctcactgaagtttgctccagtaaagaaccggatctttactgatagatcaaggatctgaattctgcacctagttctttggctaaccagttgtgtcctttgggggaaatttcttaatctttctgctctccatttccctttctgtaagtaagggattagaccaaattccatccaggattgagaaattctatggtgtgacaaagactgctggtgctgactgaatatccttacagatttgttcatttagtaaccaatataataaagatgactgactgaatcttaattatattgggtgacatctgcctagtcaaaagattgcatttctcaggctttctaagagattgatgcagccaactacatgttagcagagggagctcctgcctagaagcactcacttttactcctcctcccgtttgtgtagtagtgatttggtgctggtgctggctggagcatcagtagccatcttgtaacctaaatggcagaattgagaatggaagccatgtgttacggatggtggatcagaaagataataggaacctaggtccctgataaacatggtgtcaccattccaaccttgacctgtttctagattattttctttacttttctttttcctttcctcttttttttttttttttttttttgagtctttctctgtcacccaggctggagtgtagtggtgtgatcagggcttactgcagccttagcctcctgcactcaagcaattctcccacttcagcctcacgagtagctggaaccacaggtgcatgccaccatacccagcaatttttttttttttaattttttgtagagatgaggtctcactatgttacccaggctggtctcaaactcatgtactcaagtgatcctcttgccttggcttcccaaagtgctgggattaaaggcatgagccaacatgcccaggctacattttcttaatatgagataaaaataaacctctttcttattgaagccattactagatgcctaattcactttctaactaacatattagcatcagattatctttatgtaatttccattgctaggttttctctttgcagtattggagacaatagcttaccaactagcttgggaacttcttagtgctattagagtttcaacacaatttaccaaatttctaaaattatttagttattggatatatgaaaacataatcaccatatgtgaagaaaaaaccaccaatgtttagtacaaaaattgggagggggaatattatattagagaaagtttattaatccagaaaaccacagaatttaaaaaatattggaagttgggaatttgggagttaaaggtacatttgatctttggttaatggcaagttcacattttataataggatgtaaaaccctatttctcactgcacctgtactttgatcttcttgtctgtcattgcaatgtgattatgaggattactgggtcactctcagcctaagatgtttttgtgacttaattttctaggagaggaaggggatcattaaaggatatcattaaaaggagagacacaaggcttgtaattgaccttccttgaaagtagtcccatctggaagattttatcagtaaacatttatcagtgtatttggcttttaagcagactcttctcctcttgtctttgaaacaaacaggcaaaggctaaaaaggaacacgttagtgctcaaagtttgcttcttgtgcatgctgaatgggaagaaaaataatatttaagaaaaaagctttcttctaagttaattacatgattcttttttcagttttgcttcaatgtttctgtttgccaaattttaattggcaagttatggtgttcttcaatgattatgccttggtgtgatttgcttggatgtgtgtttagagagtggagggtagaagggatgagatttttgtgaaatacagtgagcaggggcttagaaaacctactgcagttctctgtgtgactaagcccagcactagtctgaaacttcgtattgtacttctctggaatgcaataactatcgtcaggaagacaaacgttgctgtggcttaaataaaataaactgacatgatgtattaccagtcaaaataaattacccaaacagtcttgtaaagttgtgttttttggtcatcagaactgcctcattattcatgtgtctgtttgtctctttggttagttttgcttgttgacttgcatgtatcaatgatcacaatccttgtcatttgccaattccatataaactttcagaaagtgaaaattgcttttaagaaatttattttgaagtttctacttatatttacccacataatgcccctcactgatagccagctttgtttcttccattcctttgagaatactccctagtgaatttaaagagtaaaatctgatgttgtggattataatattatacaccaataagtggttgttacacacttgtgtccacacttggtaagatgtccttgtggatgtatctcttctatgtatagtatattaatggctttatccgccatttaatgtggttcccatgaggtttaggtagaccatagatactgtttcaattagaacacttcatgaggatttagtttctctgtctatgggtcctgtatctgaactctccatttttattcttttgtttgttttttgttttgttttctccctgatgcctgatatcagaagaactctccatttttggcttcattctctgctctatccacatgagacagaccaatgtctgcaatctagtgccatacctttccaggttttttatgtccaacaaaaaaagagagcatctctttctagtagctcccacataattaagggtatagcccctctcctgaaccaatcagtcaatcacagtggtcccatctgaccatggggatgttccccaaaggaaatcagggtgttatttttcaaaaggaagaagaaataaatgctggaccttcataacaaccaattgcccactaaaagtgcagtcatatttcttgatgaaatagaacctctccttgtatactgggctccatgacacattgatcatggttagctagaagattctgaagtcttattatccactttgccagttacatttatttgtagctcaaggggactgttaagggaaaggggagcagtgctaaaaacaaatcccattccaatattattaaaaaaaccattgctctgcccttcctttattcacaacttagttcctcatcctcatcttccccagctcctccttttcagctatttcctctgtaggtgcccctaccactaactcccacagattcccccatctcctttgaagaaaaaagctagatgctcccactccctttatttcttccacagtaaccagcttaactagcacacggctttgtacatggtacacagttaagtaatatttgtgaaataaatacggaacacttaagggaaataaaaagcaatctatcctcatcaagaatgagctgagaatccctgagatagcctatttagcagcttagcctgaattctgttttagtttctgtttctggaaactcttcttattttaagaaagaatgattcttataattatttcatatttgttgatattatccagtcttagccagttatcaaaatggtcttgagaattaggaggggaaagcataatgttataaacatttcagcatattgtgcaagtaaagtcctggtagtctgggtaattctagaactcgagtagacttgaagtgatatcagaggaaagctattacccaagtttactgcttgctaatcaggcagccagcaataatgagatggtacaatagaaatgttcaaagtaaggtttcttggcatacatagctatttaattattttatttctgaaagaactatagctccactgttacctaagtttaacctttaggcatttaatataatagtatctctagtgtaacagagggaatcaattactatgataaaccatatcctttgtaaaagaatactataataccaagaaaggcttttgtcttcatctttttagtttttggttattttttgttccattccctttaggtaagaataagcatctagaatgcctcattatgagattgttaatgaatattttccattgtaatttaataagcctaaaaataagaagatactcctctactttgtcatacaagatcgttgaatggtgggtcattagttgatagcaaaaagtcactcattcttagttatgtttctgatgacttgaaaaattgagtggcagtatacaaagtctgagcaaaactgacttcagaatgagtatttggctttgatttctcatggcatcttgcccattgagccatcttttcagaggtctcagctgtatgaaaaaatagtacttttttttttccagaaacatgaagtctggcaatctttataactttgtgcagcttgttgattcccggattcaatggtgttagtgaaaaagaagtctcaggagctccagagtctcagaagaatgacaagaagacccctaattcttgcctgtctctatatttagtatccaagttggggataaaagctagtttttaagattttctgttcagaaatcttttctatatactattcagaggcagccctttgtttaaacctttttttgtctcaggcatggattaactgcaattggattctatgttaaaaatgtatttttttgaacattttgtaggcatcactccagtattttctattggtgaaatcctgatctttttctgtgtagaaatttttgtgaccttcttttctttactgaagttcccacatttcatgatcaattgtcttggtctgcatttttatccattgccctgggcacgcaatagaccttttcactccagagatatgagtccttcagttctgaaatgtttgctcttattcattgataattttatgccctctattttctctgttctttcttccttgaattctcattatcttagttggatctcctagatcatatcctttaatttcttaattgttttcttccttttttgtctttttgttttttggtcttctagaagatttgttcacacacatttttattttccaaccttactattaaaatgtttattttggtcatgatttaaaaataatttagcactctcattctctcctttttttttttttttttttttttttttttgagacggagtcttgctctgtcaccaggctggagtgcagtggcataatcttggctcactgcaacctctgcctcccaggttcaagcaattctcctgcctcagcctcccgagtaactgggactacaggagcatgccaccacacccagctaatttttgtatttttagtagagatggggtttcaccatgttggccagggtgatctcgatctcttgacctcatgatccgcccacctcagcctcccaaagtgctgggattacaggcatgagccaacatgcccagcctcatcctctcctttttaatggtatatgttcttatgtcagaagtgtgttttatctaaggtcacagattattatcctcttgaggttttcctctgtctctctctttcctgtagatttctttcttcagttgatgtttgcttcttctagtttctcttcttcattatggagagtttccttaagaggctgttcattcttagttaaaagcaagacatatacaggtgcatatgcacacacacacaaaacaaagcaacaatgacaatgatggcaagaaacaatgtcagaagttctgtgatcatggatagggctcgtcaactgtagggttgcactgttgcatcataggttgttcaatcaaagccggtgtgttctttgaaatgtttccccaaggtcatgattagggggtaccccactttctgcctgcgagatttgcgcctggggcatataactgactgctaatgtctggggagcatgacaaataaaaaagttgggtttcttattgcaaactctataggctttcaaataagcacctatttcgcaacctgcagcctctcctagtttgctacagtgcctagtatcatcagtttcaaatctctctagccgatttcctccaaaaaagaaagactccgcttccagtaggtaagggaagtagttagtttggatccaaaggctccatataattttaatacactttcagcccctcgctaaactcctgccttccttaattctgctgcctccaagcagtaagtctttctggattcgggagaacacattagtccactttctcttggaatttactctccgtaaccatttcctcgattatgctaaggcacttcagctattttctgatttcaaaaaatcagtagaaatctctcctttgctgatcttgtttcctttattatttgtgcctttgtgggtgggtgtgttgtgtttttattcctttactttcacttcagtgaagtatcagtaaaagagaaagaagataagcaggcatgatttcaccctctcttactggaaatccaggggaacgatagctgaggaggaaagtagcttggaagagcaccttagagtagaaaaagacgggagaaggtgagtttacaaaagtacagcaagatgatgatgatgataaataaaactcaatgcgtgctcactatgtatttgcactgtgcaaagttctttacatggattatttatttgtgtttttgtaagaacacctcaggaagtagctattgagacacagagaagtaatatgacttgtttaggttagtaaatggtagaggtggtattcaaattcagatctgatttcagagaccatcctctcaactgccacactatcttgcctcctacaaattgcttaagcagggatttaaaatgaaaccgtacttttacaaaaatcatttttcatgtccattatttaggagtctctctactctatcaaaagtattaattgacctatttattaatatcttagtaatgtaaaatgcttttaggtttgcaaattagtaagagaaacttcttcagattaatagatgctgtctttatgaggactgcatgagacttatgtactcatcattatatacacccacagacgatctatttgaattctgtactcttactcttttgttaaataaatgtactctttctaactatgttttaaatcatctgcaaagagatggaagctgtgtgtatacaacagcaaacatctggaagaaaagaatattcagccaaagcttgttaaagagattcataagcaaagtatgcctttgaattatgaaaatgaattcatgtccaacatcataaagaactctgacatgtctgtttatgtttcaaacatggcttagagatcactgagattaaaattcaattaagtgtgctctgttgtctttgctgtcaatttcagttaaaccagacttgtttggcagttttggggagaaaaatcttcagtgttttaccttgctaacattttaccatttggactttgtgttttttcccartcaaatgcatgtcatttaaggagatgcttcatgttatacacacctggtgattttcatcagcagttgtacagatgaaagagaagtaaaagcccccaaataattcatcttttaggctttgtaaaattatcattttataaatttttaaattgtgaaatataacaaaatttaagaaagtatgtaaaatttaaattttaagtttaacaaattgttctaaagtaaatacctactatgatcacccctcagaaagaccctataatttcctgtttcatcctctccagataggtcaccactatcttgactttacttttacttttcctacttttctttatgatttaccacgtatgtatgcatgccaaaacaacagttcaatttagtttgttttgcattttatgtaaatggactcatcttgtagatactcctgtgttttgctccttttgtgcaatattatagttgtaaaattcatcaatgttgtatgtagctgaggattgcacatcataatatatatcatgatatatagcattctrttgtataaaggaaccacaatttactgtccaatcttctttctttatgcagttgaacatatccagtttggaaatattatgaataaagatatttcgaacacttatgtgcgtgtatcttgatgcacataagcgtacatttttgtgggggaatatacctaggagtggattcatgggtcatgcatatctttaacttcagcagataagcagaaagcatttgacaaagtggttgagaaggtaatgagaattcctgttgctccacgttctaataaaaaacacttggattttctttcttttttttcaaatgacagggctctataatgggatcattgcatttctctgattactaatgagagtgagtactccttcatatgtttagtagatatttgaattgtatttgtttttgttgttgttgtagctcttcatgaaaagtactttctaaacagcatttctgagcaccctttagggagccaaaggccaaataagttagagtatttgtcacaacatggcaataagagaggcgaattcatccattaattgcttgccatatgcttatcactggaatatattttgcagcatctcctgacatcactatttatcccttttaccaaaaaaaaaaaaaaaaaaaagaaaaagaaaaaaaaaacatggctactgataatacttgggagcactcaacgaaggtcccgtctgagactctgtagaatatattatagaatgcaaatattctttggattccgtcttgttgttgttgttgctgtttcctaccctacaacttttggcatctctacccaacatttttataatacaggactgtctctgaggtttgttttccttatggttgttctcatgtataaaagagatgatgatagcgtttctcatgccagtatgtctgtgtatgatttatgttgtaaacagtgcaaagagctttacagccattgtctcactaatcttcagagcatcttttcgaaatagagaggagacaagtgaatcaacatcctctatatcacgggaggaaacatatctccctgtggagagatgtccactgctttatcgacaaggcacaaagctgcgaacagaattcaggttgtattctgactcctacactaatgcctatggactagacatggtgtaaaattttatatgcgtgaaacatgaggtgtattcatcaactgatcactattagcmactggctagaacatgaagtgtttgtttgtttttcaaaagaaagatatgatgaaactttatatgcttttacacagttctgatattttaacaatttgactaatttttatagttttattccttccagaaattcctttaactgtgcttatcccgtaagtaattgctaatgttcttaaactaatcgagaaaatcatttctattagtccctaaatacccagacttcataccttcttgcttcccactctcctcatatctaatctctcccttaggtttagcaacaaaatgtgcagcttgacrtggtcagtgggtgtctgaacatttagtgctagtgtttcctctcatctctctgcttttatttggacttctcaactcttaaaagtaattttaacatattataagaaatctttgaatttataacactttacagtttatgaaagactatataaaggttccttctcacaggctgtaaggggtacaaggacaatgaaactcagatgacatccttaaatgcactctactattatatggctaatttaagattaaaaatctggtttcataattattagtctagtggtccttttataggcagcataatacagttgtaaggagtacagactgcctgtttttgaatcactggtccatgctaactagctggcttacccttgggcaagttacttgaggttctctgtgcctcagtttccccagctatcaaatagatctaagagttgtgaaaattcaatgagttgatacatataaaaatacttaaagcagtgcctgtccaacataaatgcttaataaatgttagccctattatctttcctcattatttagtgttaaagagcaagaacatctataaaaataaaaatcaaataatccttcaaaaattcctgaatattataaaactaacatataatgtcaactaaaattgataccaattagtttccttatcttgaatgaaatcagtattgtagtcagagccaagctactgacctggattcacatataacattcagtttctcttctgaaactccagctcacttagcacatttatgccaaaaacaacaacaacaacaacaacaaaaatgtataaattgcctcatttgtttgaagtgtaacactcaggttttccatacagcaggaaactctgatagaagtatagattaataggcaaggcattgctccattccctaaaggcgtaataaggctattccacaaatatgtattgaacttctacacaggtttaagaattatgaggaggagagaagatattgtaatgaatccctactattctgtttattttttatttctttttaactttttaagttcaggggtacatgtacagatttgttacataggtaaacttgtgtcatggggtttgtagtacagattatttcatcacccacatattacacctaatacccattagttgattttcctgatcctctcactcctcccaccctccacctctctgataggtcacagtgtctgttgtttccctctatgtgtccatgagttgtcatcatttagctcccacttacaagtgagaacatgcagttcctgtgttagtttgctaaggatattggcctccagctccatcagtgttcctggaaaggacactatctcattcttttttatggcttcatagtattccatggtgtttatgtaccacatttgctttatcctgtctactactgttgggcatttaggttgattctatgtctttgctattgttaatgctgctgtaatgaacatacacatgcatgtgtctttataatagaatgatttatattcctttgggcatatacccagaaatgagattgctgggttgaatgctagttctgtttttaggtctttgaggaattgccacactgtcttccacaatggttgaactaatttacactcccatcaacagtgtataagtgttcctctgagtacctgttattcctttgaagaaaatacctacacaactagataattagagaaggagagaaagagaaagagagagaaggatggcacaataataaagtgttttttggaggcaaggatgatgttttatgaatttttgtattcccagaaaataacagataagtggttattagtgaatgaagaaatgaatgagttaactaattgtagcagaaaagggaaagataaatataaataaaggtcatccatctatttaacaaacatgtattgcatgcctaggaattgtacttggcttgaagactttaaagtagattaagacagtcccagacttcaaggaccagcaactgagggtgttaaacagaaaggacaatgacattacaacaagctgtgggttcacacataccatttcaagactagagaagagaagaaaatcagagattcttccagaaatgaaaattcttgagctggggctttgaggatgaggagaagttagttagttagaaaggaaagatgagtaaggttgggggtcaatagttcgagcaaatattgcagtatgaaaggtgtgagagagcctcaaacaggttacagattgtggcactataggtgatggggaaggagtgagagaggtaactacagagaagtaacctattaggaactgctaagaaatgttagatattatgctaaaaagcttggaatattttttaaagcatgggggcatcacttgatgatctttctcaaggacaggactattaatcttagggtttattatattcttcaattttgacacaatttatacttcaataattctctgtaagaatttttttcctttgtggtcttatttatttattgagatagggtcttgctctgtcacccaggctggagagcagtggcaatcatggctcattgcagccttgacctcccaggctcaaacgatcctcctgcctcagcctcccaagtagctgggactataagcacgcaccactgtgcctggctaatttttaaaaatttttgtagagacaaggtctccctatgttttcttggctggtctcgaactcctggtctcaagcaatcatcccacctcrgcctcccaaagtgctgggatgacaggtgggagtcaccacatctggccttatttttttaacgtattttttaaaaacccaagaacaggcattttctgcgtaatgtgcctgcattttggctttgtatttactaatgcttgaattattgccttagctatacataatcaactgaagaaaagtatttaacttttagctacagtgatttctcatatggaaactgtatacttctcagggattgtggaaatgtccttggaagtctatgacccctcaaatttgagaaatgttgatgtggaggtagaattggagtaggcaggggaaagacaggtaccaggaaaaccagttcagagcctactacaataatcatatgagaaacaaagagggcttgaactaagggagttcagatgaaagaagaatctaatagttatttatagagtaaaatagacagaacttggtgacttccaggattttaggcttgagagagggaggactcaagaattgtacatgggtttctggtttcagtgattagatttctggcatctgctgtccataagatagtaaaaactgcagatagggtaaatgccagtattggaaatatgaagtttgaggtgtctgtgcacatccagatagaaatttatggaatgtggaagagcaatgtaagctggggttttcagcacaatggtaggtaggtattgtagttttgggggtgaaggtactcacacaggcaatgagtagactaaaaaaasaaaaatatagagaaagaagaatccaacaaagagattgagaagtagtggctgagaagtaggcagaaatttaggagagtggtgttctcaactccaaggtaggagagaattccaagattggaattgttagaaaaatttgatggagaaggtattctttgaactgtgtgtgaatagacaaagagctctgacagagcagaaaggaggaggtatggattctgggtgaggaaatgttataagcagtcccacaaagagtgacatcagatttatacaagaagccagagcttgactgtagtgggcagtacagcatagggtggaaagcatagactctgaaaccaactccttaggttcaaatctcagctctccacttttagctatgtgacccttggcaggttatgtaaccttctaaagcctcgattttctcctgtgtaaagtggaggcagtgatagtacattgttaatagattgtttactttttactcttctgtatagacggaccccttgcaaaagtcagggtgattttatatatacaacatcgttatcagctacctctgaatacttgattcttttccttctacaaccccaacctccatttgaaaagttctcattattctttttcttacctattctaaaagtatcactcagtccccacttcctccagggagcttttctgacgagtattcagctcttacttcttagacctccagtaacatctaatgtttgtcaagtacaattaagcacttgcttttacaaaactaattgtgggagattatttctaatggtttcatgttttttaatcttctatccccaagaaagattgtaaacttcttaaagtcaagatacatctccagggtatccgcacattttgccgtgcctgggacactcagtttatgcccattgtcctgatatagtttatatgaattcataatttatagtgtccacttttgactctctcaagagggtagttgtttgcatgataaattccatgaacaacctggatataataatacatactttttgaaattagtaacaaatatttattgagtggctatagcatatctattacaaaataataataagcaagggggagaaaacgaactgtcaataattatgccattgagagataatttttctgtctctgtgtgtgagagtgtgtatgtagagagagaaggagttttactaacaacaatgagattatactgaaggtaatattttataatctgcttttaaaatttcacagtatattgcatcatgaacacttttcttaccattaaatacaattctctatataacattttaatggcatttccttacatgaatatactacacttaagcaattttctattattaaatatttgaagctctccccagatttcacattataagcactattgtgatgaatatctttgtgtagagtctttatagcaaggctgggttgttttcttactatatatttctagaattagaattgtcaaactaaagaattgcccaatattttaaagatttatttttgctattattgtcatattgccctgcagaaagtttatatatacttcatcagcagtctctatttctacattatttccgttgctatattttatcattttaattgttctctttatttgatgaatcacatagtattttgttttaataagaattaatttagcttcaagaatattaaaatctgttttgtgtgtctaatggcaattatacatatttgctttttattattttattatttattcgtgggctgatttgttttttcttgttgattttatttttatttattttttaggagacaggtgtctcactttgttgcccaggctggtctcaaactcctggactcaagtgatctgactgcctctgcctctcgaagtgctgggattacaggtgtgagccaccacccctggcctcttattgattttagagtgttctttagagattaagaatattaacttttcatttatgtttgttttttacacttttttgccatttattcatttctatttttacttttacagatactctattttaataaatagaagtttaaatagtccctatgtagcctgtatgtttatattgtttatatagtctctatataaatatattttataaatccttagcaattcttttccaacaccaatattttcttctagtatttaatcattttacatcatatatttatatctctaataattatggaatttattttactttatttcagggctctgatgttcttttcctagattttctaaattgtcagaatcctaggtattacataatctattatttccttattggcttgaaatgccacttctactgtttatggttagttccttttttaatctttacatcctatttctagacaaaaagccccatgttataattattatggattttaagaaatacattttaatatctgggagaacatattccctcttaatcttattttttagaatttcctgggttattctcacatcgttgtgctaaattatacaaacaatctacttgtcaagtcccccccaaaaaaacccattaagattttgattgaaattgcattaagttgcttataagcagtttataagtactacagagctccttatgatatccctgccaactacttaagaaactcctagttcttaaattacaaatattcccagtcaagaaaggatcaccagacatttgaaaaaagacaaaaaaccaaaccaaacaaaaaaaccagtagcctaaacaaaaaggaactaataaataaacaggacaaatttattttcctgagacaatttatcttctgctttccagaagaaacagagacaatgaaaagtgtgggaaaaatttgtcaatattaaattttcagagatattcagggggagaatataaccattaagtatgatctgatttccataaatagcagaatactgaatatatatgtatatataaagattggataaaatgcaattcaagtaatattcattcttgaatattgaattaagcaaatatcttagaatatagagcaaaaagccaaggatataaaatatgatggaaaagtaaaaaagatatgaagaatgtggtagaagtggaggaatgggaaaggatgtgggaaaataacagaaaaaaaatccttgacctgaagagtaattcaagtcctcagattgaaaagtttcatccaacaccgaacaaggaaaaaaggatacatatctagatgtgtatacacatgctgatgaaaattttggaattctaagtataagaaattaatccttccagagaacaaaaaaaaaggatctttcaaaggtatcaaacttctcatcagcaagattagaagtgaatgcagactaggcaaggtttcaaagttctcaggaagaagaactagaacccaaaattgatagtcaaactatcaagtgttaagacaaactaaagatgtatttaaacatggaaggactcaagtttacaactttacctcctacagattcttcctaattaaaaggaagtattactcgaagatatattcaagcaaaacaaagcaacgggaatcctatacagaaaacctaggatacaaagagcattggaaccaacccagatgtttatgaaaataaatcccagtatgacaactgtgtagtagtaggcctagaaagcaggcagcctaagttagagtcatcagaaggttccaggaaaaatgctttcaagaagaaagtagacatcacatttcgaattgcataattaagagccttttaacattttagggcaaaagtaactgcatttaactcatagattaatctaagacttgatatctttataatattgactcttcccatgtaggaaactagatatattcttcaagtttttaaaaatgtccttcagtgatgttttgcaataatatttatacaagagttttacatttttcgttgtttatttatacatatttgatatgttttattactattatgaataggatcatttatctattttctaactggtatatagaaaaaaacctgttgtggatacatgctttataatgtttgacctttcttataaatcataatggtctaccttttttatacctttcagttgattctcctgaattttgagttacagaatttttatcttaaaatagaatgatttccttctctcttaaaaatatttgtacagcatatttggttttcttgtttggttgcttacgttagaattttctgagcaacattcagtaatagtggagacagcttctttttgtttctgatttcattgttaattatagatgtcgaagaaaagctattcattaccatgaaaaggaactattctattcttattgtactgagagtgctattttactatcaactctttaataagtgtgatatactactgtattaggccattctcatgctgctgtgaagaaataccctagactgggtaatttataaagaaaagaggtttaattgactcacagttctgcatggctggggagacctcaggaaacttataatcatggcagaatgcacctctttacagggcagcaggagagagtaagcaccagcagggaaaattccagaagcttatataaccatcagatcttgtgaaactcattcattatcatgagaacagcatgggggaaactgccctatgattcaattatcttcacccagtccctcccgcaacacatggggattatggggattacaattcaagatgagattttggttagggcatggccaaaccatataatctacattaaggacattgttaagtggcaggataaatggtgtgggctcaactttatactatagaggaccattatagcaatatcataaaagtaatactttgagagactaagccaataataggacaaatataaatttgaggaaaagatatacaaaaccatttagtaattcaagcatctagtgataattgtataaccatatggacaaaggtagagaaaaatacctatagaaagtttgaacttaagagataggtcaggtaacaaacccactttttttcttttttttttttacctgattacttcctggtcatgaggttcaaaatatttgatagcaaaatgatttaaagtccaaattaatattgaattgaatatacacattacagccaaaaccagacctatttttctgttgcttatcatatataattatagaaagcataactgaacaacaggaagttattacttcttaaatatcagaaaacatttgactttctcttctgaaataaggaacggcagtaaccgaattctagttactgctcttaatagttttgtagttctcataaaatattgcttatatattatttggctcccacactatccattttgatggttttaaatttttcaaataaaaataaatgagttttcatactatggatgacttgacatcagttaaaagtgtaaattcatacttgaagatagcaggactctatgctctttcctcattgttctggtcaaatacatttccaatcatgataatcaataatgtgactattaatttttacttgaagttaatctattcatgtttgattagaagtgtctaaaacataaacttgggatgtcaatgaagaactttttaaaattctcctccacaatggctgataatcaggccatgattatattttgaagattttacctagttagtcatatttggggtaagaatatatgctatctccttcatattaatagttcagatctttaattataacatgtttcatggtctataagattaaattgaacattaggaaagcttagcatttctcatttgtgagtcttacattcacacctgtcaggattggtacagattcaagcttgtttttaataaacttcaaagaagatcaaaactagggatcatctgtttcatgtctttgacgtgatagaagtttggggcccccgttttgccctgtagcttttgcctaaggagaaagccacccttttcagctgatacttgctcccacaggtttttcacagtttttgagtagcgagtggcaagaagcaatatgacgatgttggtaggtagagagatacttcttcaccatctggtgagcattctggagaacagagacaagtcccacactgttaaaggagtgaagtcattttgcagccagttttaaggattgatttaagaactctaggagcaggccattatgtagtcatccattcagcacgattcttcgtgggactgtttacactagaaggaactgtagtgatcaatttagcgttgaggaaactgagggctacagagtgccagggtcacgttcatcacacttatttgtgtttcaaagcagaatccacactccaaaatgtgcaactactgtcttactatggaatttacactgacacattctgaggtcatgcaggaaatagaccagagtaaagcattagcaattaggtcagtagcttgagataatgcaggctctgaggcaatcttcactttcactgaccacagactgggattgggaacatgggaaacgtgtgtgtgtacagacacagcaacccttttctatgtgtcatgtcttcagctgagttttaagttgtactagtggaagccatagcctatgttggctcataggtcctagtgccctttccccttcccttgcctctgcccctgcccctttccttgccttgcccctgcccctgcccattccccttctcctctcctctcctctcctctcctctcctctcccctcctctcccctcctttcctttcctttccttgacactgggtagagtgtaatgcaatcatagcttactgcagccttgaacttccagggctcaaccagtcctcctgcctcagcctctgggtagcaaggacaataggcacacaccattatgcccagcttattattattattattattattattaattttgtagagatgggtcctgctatgttgcccaggctggtctcaaactcctggcctcaagcaattctctggcctcagtcatgcaaagtgtagggattacaggcatgagccatctcttccagctctagtgctatctctttataggaatcaaaaatttgttttggctatttcaaattttgtagagtaagaggtcaattagaaaagactcagttatgttttcaaaaatgcactgtgtgcatatgtgtgtagaaatgtattagaatgaaataacatttttttacagtggctaccattggtttgtgaaattatgcatgctttttcttaattttctctaatttttctctatttcctaagatttctaccatgagatttttctcttaatgtctagttttattacataggtaatagataaatatattcatgtcataaaatatttttaaaattcagaatatgagaaagtcctttttcatgctccttagtcttgctgtctttcttgaaagtatccacttagtgatggatacaatatggtgtatatctgccttaatccattttgtgctgctctaacagaatacttgagactaggtaatttatcatgagctgaaatttattggctcacagttctggaggctgggaaatctaaaatcaaggtgctggcatctgttaagggtccttttgttgcatcaccacatggcagaaagcaaaagggagagagatagacagattgggagagagagaggaaaggggaccaaacgtctcactcttttataacaaacctgctccagtgataacaggattaacccttacatcagggcaaagctcacatgacctaacacctcttagaagtcccaactcttgctggatgtggtggctcacacctgtaatctcagcactttgggaggctgaggtgggtggatcacttgaggtaaggagttcgagaccaacctgcctgagcaacatgaagaaaccctatcaatacaaaaaaatacaacaaaatagctgggcatggtggcatgtgcctgtagttccagctactctggaagctgaggtgggagaatcacctgagcttgggaagctgaggccacagtgagctatgatcatgccactgcactctaacctgggtgttgaagtgagaccctgtcaccaaaaaaaaaaaaaaaagagtcctacctcttaatactgttacaatggcaattaaacttcagcctgagttttggatggaacaaacattcaaaccatagcagtatcttttcagaatttttaactgaatatttatatatatgaacatttagaattaggggtaatttttaaaaatcaaaagtgatatactacagatgttattytgtgattgatctttgcacttactatgttttggagattattttattttagtacgtataaatctataccagttttcttaaattgcagcatagtatgtatatcaagtttatcctttaactattttcttactgatggccttttttaatattgcaaaccatactacactaaacattgtcgtgcatacttccttgtgtattacattggtttttaaatcaatgaactagttgtaaacatggagagaaacaacaaggagggagatggatataagagaagaagagattaaaggggatggaatcagttgtttctggagcacagaatattcaccaaatttgaccagatgcgcggttgctcatttaggaaagagcaactgcactgggatgaagaggttttttaggaaatcagaggtcttcagagaagttttggttaaaatctgcagtatacactaccaaaatggtttttgtctttgttgttcttatgcaagaaagactagctctttttatctagagctggaaggttgctgtcttggagtgggggagaaaggagacaagtatctgatgggtgggaatggaaggtgtgtatccttgcagcagacctccagagtagctgactgactgatatgcatggtagtcctaagatgtgtttgagaaaagaaaatattaggagctcttgacaaatcttgaaaatcaatacaaaaattagccaggcgtggtggcgtgtgcctgcagtcccagctactcagggggctgatgcagagaatccctagaacctgagaggcagaggttgcagcgagatcgcaccactgcactccagtctgggcaacagagtgagactctgtctcaaaaaaaaaaaaaaaagaagaaaaaaaaaatcagttgcccatcctgcagatatacagtatagtgtaactgcttcagccgcttgcaaatctcttttacaattcaaaacaaattatggagaaataagagtgaaatattttcctggaaaaataatgtgaaaaattgaagttttaaatatcatagttaaattgaatgtaccttagggacaactcctttatttaaaactccaattctccaataacacacctaatatttgttattttgttgttaaatatttactctatgtagacattatgctaagagtataatgcctttttaatattcagaagagcactctaaaagctattacagctttacagacaagaaacttgagaccagagagaggttaagtaacttgaccaattgtcatatagcatttaagtggcagagttaggatttgaacccaagtttttatgtatttaaaattctggctattaacaccacactgcaaagaaacttatttagtagataacaagttatatccatatatttttagatatcaatatatatgttgtggatcggtagcttggggcacattactgctttgaattgtggtatcttttattagatattgaaatactggattattgataagaccatgtagcagtgagaaaaatagtttttgctttgatttgtgtcagttatactatgttgttggagcttttgaagtagggagtgatcaggtagagacaggcagaagagattagtttgtatgtgttatcctgaaatctgagttatttgacatttttaaggcaaggcattgattgagttttatgaagataaattggcaaagaaaagtaatcccatctgctcaataacaattctttgcttttagccaagaaaattgatttcaacttgagagtaataatcatatttatcacacttgttaattgcatgaactgtatacaaattgtcaggcttattaaggtagatatttacggtcactgggcgttcctcacattccacattttcattgttatggcattaactattttttctgtttctctctttgtcactgaagacttcacgtagtataatagccagtattttctgtgattatatagcaatattctcaaacctaattgttcatacaaagtacaaatcagggactttttctactaggttctgaagtacttgttctctagatttaaactccagtgttgtactaatgggagtaagtttttcttttatctgccaaggagctcctcttacatgtaaaaaactgttgtttttcctctttgtaaatatcagtgtaaagtacacactgtataaaatgtaaattactgatgtgagagtggccattttattcacattgttcaatgccaaagtgggccaaaggattctggctcattaactttaaggaaactatagtattcttttgtctctttagccttccttctggtttattcaaagaattctcatcaggttgatcaagagttgaaaagtaaagcactgttcttaaaaactgctctctagaaagatctgcaatggttttgaggactgccaagcaacaggaggtagaaaaatggataactaaataacctcatttacagaaaatatgttaggttaaattgcataggaaaagatagtatgggtctttaaaaaaaatggatatttataacaaagaaaggataaaattaataagtaagttataaggaatatttagaaaaataaaaacagtattctaaaagacaatacttatatctttctaatgtaaatcttagaaaatggtgagaatttcttgtatgctttatatttataagaagtaataatagcttttgaaataattccatattataagaagtcttttcttcatatgtacccaattccaaataagtggatgctggaagaaaatctgtaatttattttatttaaaagaaatgcagtatattaataaatacctattttttggataataaaataagcaacattttccagaatgaggtttttttttgcaacaaatgtgcataccaatgatttgaagtatttaaaagaaacttttctacttgaaaggaaccaagatgactaagtactaattttgcggaatctccaattgggaggatatctactgctcagaaaagcaaactaaaacaagacaagaaattaaaattgacaaaggagaagttccatataatctaattcaaaatcaaatgagtttttcaaagaaataagtttcatcatgtaatctaagccaaaatgagctgaaaatttacacacaatttcttttctttttctttttctctatttcccattaggtggtttccatccatggaaactagttacatggcattcctaccatcccatgcccatggtagacataattaagaaattgtgtgtgtgtgtgtgtgtgtgtgtgtgtgtgtgtgtgtgtgtgtgtgttttgtaagctttttactccttctcaacaaagcatttcaaggagccaacagcaaattagaattgaaactccattatgtctctcaggtcttctgatcagctcttattatacttactcttagtaaaataatctctattaatagtgagaagtaaggaactatatgatataataaaaagtgctctaaaggaagtcagaacattgtgtggaagtcctggttccaccattaatggtaaactctttgaggacttccaatttctccaggactggttttcaatctgtataattaaggggtttaggctagactctctttttattttttgaaacagtgtctcactctgtcacccaggctggaatgaagtggtacgatcttggctcactacaacctctgcctccctaggttgaagcaatccttccacctcagccacctaagtagctgggattacaggcatgcaccaccacgcctagttatgttttcgtattttagtagagatgaggtttcaccatgttggccaggctggtctggaactcctggcctcaagcaatctgcctgcctcggcctcccaaagtgctaggattacaggtgtgagccaccacacctggcctagacgctttctaaaattcttttcagtttcaaccttctatggcttttggattcttttatttcttatactttcatattactgaatctcataactcactttttcctccattttatattttcaacttttctagtctagggctctgcacaagttattactctgcccttttattactactccaaggtaattcatgttatatgtagatgtatattagccatgacaataaatctacatactgtattatcatctttccagaatttttcaaaacagaaagtctttcttgactaatcatttattccccatataatagtatgaagttattaacaaacgttccttgaattatgtgtgacagaatttgctgggagcttgaatcagtatatttgtttaggctgcatataacagaaggcttcatttaaaatagcttaaataataagagatttattgaattatataataagaaggtagtgatagaatgattctagtagtacaaacatgcatcaagaatccagattctttccttctttctagtcacccatcctcagcacagtagtttttgatctcagttttatcctcttatggtctcaagatgactacagcagctctaagtatatttatacaacttccttttcttctgtcactttttaagaaagataaaaactttaccagaagttccttaacagatttctttctcagatctgtattagaaacaaattcatcatatgcttatatctaagccattcattggcaagagaaatgctatgaaattggctgggaagtaatcatggttcatcctggtcctgggaggggcctgatctcccttgaagcaccaaccgcctgacacctgaacaaattctagtggctgctgggtagggaacaacagtgtctttacaagttggtgcattataaatacatttccataatttgaatcaagcctaccatctcctcctcatctccaaccacccgccccccccrccccccactttattttctgtatcttcagcaacttccagaaacttctcattcttccttaaatacacatttttgtacctgccatattttgcatgccctcttttatcagcctggaatgcactttgtcacctttgcagcctggtaaaaccatcattgtgctcatatttcaagaaccacctcaaatgtctgctctttagatctgaacccttcctgaattccccagcttagcaggtcaagtgagttgttctcagctttgtacttctgctatagatcagccctcatcattttataactatgtattgacccatttactcctgagaatcctgtaaggatgggactcagttccttggtattttgttctcagagagatgatgcttcatacttaccaactgttcaataaagtttgttgaattaatatagttaaaagcagatacctttctgttataagttcaaagcctagtgattgaagatttttctttacattatttaaatgtatttattttggtaaaatatttagagcaagtttcattccatctgttccatctaagcgattcatgacctgcatacattctaaatgacaggaaccacaagcaactcagtcagcaggcttcagaatcggtcatcctaaaagatattgcaggtcaatggctaatacactaacaaagaaagagcttatgcaaataagtaaggaaaatactgtttcaatgttaaatcattaaagacaaattcagactactcacaaagaagatctataaatgccaagttagaatagtaaaacagaaaacaaaaaaacaacatgaagacctctgattacatctatagtaattaacatatccatttaactcctctgccttcagaaaaccatcaatggatgtttataggyataaatgacaaggacaaagaaagtgggaagggagataacagcaacaaaattttggaagctgaaaaacmagtatacaaggggtatacttcctgatgaatgtaaaaccgtccctagacaaggggggcctargcaggttgaagactgagtgccattctgaaaacagagggattaaataaacacttatatatttgtgttcatgataacacaaggctttttaaattctgtttaccactgtgtctccggtggctagaatagaggctgccaaatatagatgctcaaatatttgttgaatgaattccgaagrttgaaagtcccaaccttcttcccctagtcagcttccaactatgcttaagccttctggacaggagattgatataacctttggagaattcaccaacccaagagaaaaaacccaaagataatggtgcaaggtatttctgaatgaaactgttcagttggatcatcaaaaagtggatgtagttgacaaatcttacctatgcaaacagagcttccaatctgatttttagtactctagccttaaatatgagtagacagataagatttatcaaatacttagaaaaagtaagtgaaagaaaccaaaacaaatggaaaaagaccaacttcaaagtacagatgttggccgggcgcggtggctcacgcctgtaatcccaacacttcgggaggccaaggcggggggattaccttaggtcaggagttcgagaccagcctggccaatatggtgaaaccccgtctctactaaaaatataaaaaaattagctgggcgtggtagtaggcaactgtaatcccagctactcaggaggctgaggcaggagaattgcttgaacccaggagatggaggttgcagtgagccaacatggtcccactgcactccagcctgggtgacagagtgagactccatctcaaaaaaaaaaaaaaaaaaaaaagaagagaaataaaaaagtacagatgttgcaggaagaaggtatcatcagagagaggagaagaaatacacttgatattgtattcataaatattaacattgcttccacgaaacaaaagcagatgctatggaaaaaaaaaaaaaacaactcagagaataggaaaagagctcttggaaagtaaaaacatgatagaataagttaaaaactcaatagaagggttgaaaggtaaattgaggacatctctatggaaatggagcaaaaatacaaaaaggtagaaaatacagaagaaaaagtgggaaatcagaggaccagttcaggaaatctaacatctaaaatcagaaattctagaaaaaagagaaaactgcaggaggacaaaattgaagaaaaatttccagaactcattaattggagcatttagcacaatataaagtattaaaaaagagacttgtgacttgttctaaggatcattatcgtatcgtatagaaggatcaaaaatcaaaagggcatcagacttctgaagattcgttttgaaacctagaaaagaatgaagtgatgccttttaaattccgaaggaaagtgattctcaaccaagaattctatactcaaccaaactattgatcaagagtgagcatggaataaagattatttctgaggtgcgagcctttaaaaaatgtatctctgatgcatactgactcaggaagctactggaaaacgtgctcaccaaaacaagggaataaactctaaaaacattacccttgggataataaggaaagaacatcccaaagtgacagctgagcaagagacatggagaataaccaatccaggtcaaagaggcctctggatgagatttcttcaagaagatgaatttaataaaattcttgatgtgtttgagccatacttagatttttgtaatatgggaaaagtttgggattgaattagtgataagtatatatggacatctaagggaacaaagaaactaacaaaagacaagaattttcaagaaggaaaacaaagaaaaaaaggtaatcagggtatgttacatagtttagctgcttatagtttttctttggttctgctcatggaaacacaatgactatcaatctaagtaagactataatatattagaaggatgggtgatgagaagtgtgaagtgttgcaaaggtaaatccttatcttccgctatgaagtatcaataagcaatgcccaaaaaaatgaactattaagaagtaactgtaaagttatatcatttagagatagagtggagtatagcaaatgaatcagctaaaatatttgaaaatgggtaccctctggggagtggaagatacatgtatgtattgtgggtgggggatgcactgcaggagatctctttttttaatccttgtggtactacttagttctctaaactatttgcatctataactttgctaaaaataacatttaaatttaaaaattgatcactcttgtaataagttcaaattgaaacaaggagataacatagttgctaagttttatttttggacatatttataacattgtatatgtgttagtgagaataccatgtaacatcactctcaagcagtacttctaaaagtagaaattgctgtaatatttctcaaaaactatctggcaatacacattaagaggtataaaaatgtttattccttctgacttagtacttctgcttcagaaatctcttacagtgatctaccttctagaaagactggagataaatacatcaaaatgttcacagtagttgtctctgagtggtagaattatgggtaaaaaaaagatggcttgtttccatttttcttttgcacccctctgcattttttccaaataatctataatgaagacaggctccttttatatttggaaataatttccaaatataaacattttaattttataacattttaaatttttcaaaacactggtcctcataacaagaaaagttatttgttgcaaccacagtagaccaggttaatggtgccaagagtggaatgcggataaaggctgacaaggccatctggaactgtgagtcattcagagcatcacagaagagagattttctgcaagtactagctgtgttgactgtgactgctgttttcctggttgctcaggaatcacccagggaaggagagggcttccccacgggattagggaaaaaaaaaaaaaagcttcttgttccataagagagtctacagataggatgagtaataagggatagattttactaaggtagaacaaaatgttaggacgctggtacgagcaccactgaaatatccctatatcaagttttagtcttttcattgcatcttctgaacctgctggagatgctttcacatggaacgtatttgctataaacttttctttatcttttgttcaatgctgtgaagtttgctaatcttaatgaaccaagtctcttcatgctgacaactcattgtaaaagaggtaaaactgtgtttccatggtatggggaatggagaggtataaggaggaagatggatttaaattgatttttggaatgcttgctttattttatcagttaaagaaaaggtctaacggattatttagataactttaggctccaactgcactgatctgtttgtcattcctttaagaaaccattttgattctgactacttgaatttgcacattttgttccttctctctggaataccctaacaaattctttctgcctgataaactacttactcttccaggtcaagttgaaatgttcccttcagtgtgaaaactttcatgactcaaaaaataacaattataataattacaatttgatgagctacctggctgtttacctaattctcacaccattagatgagcgaggtagttttaggctaactttaaaaaggaggaaactgagacttacaagacttgggtatgtggcccaagagtacatagctagatttgaaacccaagtccaaacccaggacttcctgcttaaagccccttctttttcaaaaactacattacctattgattattttgctttacatgtgcttacatgttgatcttcctcagtggactgccttcattccttaataggaaataaattgtcttttttggaggtgttacatttttgcatataacattaataagattaaaattttcatttgttgttgacattctttgcttgactctacactccacgggataggatccttgggcatagaaaccacgaatgctttgctcatcactgaatccagcatctgtcagtgtctgccatataggaattgctcaatatacatttttgagtaaataactgaactaacaaatgagtgaacaaaagaacaaatgaataaaaaacctcagatctagcccctaacaaaaaatacttaaaaaaaagttttagtgtctcaattgtctgtatagacaatgatttcacaagttcacgtgaaatacactaccaatatcaacaatcatgttaaatcaaatgaaatctatatcctctgggaatgcttgtggtatggcttagggacaagctttacttatgaacaatgatactgagacttcacaatagtcagctgtgcagatgtcagactttgcatttcacacatgcttttaacctagagctcaaataggcagttttaagccctggacctcaagtcaatgtggttcatgttttgtcacttcaagatctacaattgaacttcattacgatagtcttagatggtttttcataaattttgagtcatgaaaaactgacaacatatgagtctccaagtaccttttaatatatgcaatattttacctacttaatkaatacatgtgtttatttgataactaaaaagtttataaagtctagaaataaagaaaagtccatgtcctttttcttttttgttttcttttaaatgaaaactcatgagaaataagagggcagaatgcattaaattatttcttctgtaacagcacaattctatatcagattttaaatacaaaagaacatgcaaagggataacagcattgacttcagttctaatataaataaggcaggaaattgggtgaaatcagtttttcctctaatcttacatggaaaaaaatttgtcatttggcaaacccatatgaatccgatctgtttggtttattcatccatgcagtgacattcagactccaaaaactgtatcagaaacctagtcaatatttaaatgccatcatatagattagaaatggaataaggtataggtaacttactgcatttcaaaaaaagtactaattgaaacatattgtcaaacatatatctttttctctctttagaaacctatggctattttctgtctttcagckcacgctacagaaaggcctatttttccttctgtcttagtccattcaagctgctgtaacaaaatatcatagccaggcacagtggctcatgcctgtaatcccagcactttgggaggccgaggtgggcagatcacttgaagtcaggagtttcagaccagcctgggcaacatgatgaaacctaatctctactaaaaatacaaaaaaatcagccaaatgtggtcacaagcacctgtaatcccagcaactcaggaggctaaggcactagaatcacttgcacctgggaaggagagggtgcagtgatctgagatcatggcactgaaatccagcccgagtgacagagcaaaactctctctctaaataaataaataaataaataaataaataaataaataaataaataaatcacgagctgggtggcttataaacaacataaatttatttctcacagttctggagactagaatgtccaaggtcaaggcacggtagacttggtattttgtgagggctcatttcctgggtcatagatacgtgcctctggctttgtcctcacatggtggaaggggcaaggcagctctcttgggcctcctttataagccactaatccccttataagggctgtgctctcatgacctaattatctcccaaaggccccacctcctaataccatcacattggtgatgaggtttcatcgcatatgaatgtggggagggacacaaacattcagactatagtatctgctttttgccacagaatgaagaataaaccacgtcttataaataaaaatctttccatggtcccccaccacataaggacatgaccaacttcctttgctagtcatccatctctcataatcctctccagcccatctctgcagcctcatctccacccacacatgcattctgctgtaacaaatggtgggcaggcttccaaatgtactgtgttcccatgaagttgcacctttgctgatgttattctctttgcctgggtcccctccccatctattcactcctttctgcacttcacccttgctcttcttgtgccctaatagctcctccttttgtgacacatcaaaaattgcccactgtaggaagcccctccaagactaagagtgcctctctctgtgttcctgcatgtgcttttggagcccttatcacacagttgctctagaattgttagcttgaccacactgtgagttttcttaagggcagggacttattcctctttgcatatctggaatcttacccagtgtttagtacatactacatgttcaataaatatttgttcaatgaatcaatgaattgataggttttcttttagtagaaggaataaggtacattttttttagaacagcatccgaaaagcaagcaggaaaaattgggacatctttgcttaaggtaaaaatgcttttatggggaccacctttgaaactccatctacttggatccttttagtcttctttatgagataggaatattaattcttagatccaattaaagaaggtctagttaccaaggaacaaaacaaattggtatagaatggactttcttataagagagtcccaaatcatagatcataaggacaatcttatgttgaaatgtctcaataacttccaaatgccgatgtgaatgatatcatcaaacagtgtgagtcaaaggaagaaatgggattcctaagttttcattgtactccttgactattttattggtgtacagtctcttgacaattattttctcatcttctttcccaaggaaactttagatttaatatgtttattctgcaagatgtttggagacaggtatacaccctaaaaccaccattacaatcaatgccataaacttattcattgcctccaaaagtttcctcccatctttttgggtttttttgttttgttttcctttcatggtaaggacacttaatataacagctacccttttaccaaatttctaagtatacaatatagtattgttgattgtatacttatgttatacagcagctttccagaacttattttgcaagactaaaactttgtaacccttgaccacatctaccaattcccatcttcccccagcctctggcaactaccattctactttctgcttccatcagtttgactattttggattatacatgtaagtgagatcatgcagtatttgtccttctgtgtctggtttattccacttagcatgatgtcctccagttccatccaacttgttgtaaatgacaggatttccttccttttttagggctgaataatatttcattgtatatgtgtgtgtgtgtgtgtgtgtgtgtgtgtgtgtgtgtgtgtgtgtgtgtgtgtgtgtatatatatatcacatttcctttgtccattcatctgttgatggacatttaggttgcctctgtatcttagctattacaaatatgctgcagtgaaaatatctctttaagatccagatttcagttcttttggatatataccaagaagtgggactgctggatcaagttacttcctgtttcgaaagtagggcaccctctggacatttctacaactgaagtgattgattcttacttttggaagtcaggctatttgttggaatggtggggaaaaaagctagagcttaaaaataaatctaaagttggagaggggattattactgatggatgcattaattcaagggttactgatactctaaatacatttttaaaagttgtttgattaacaagtcaaaacagatggtttaatgacattttagagaggtttaatagagatccaactgaattaacaaatcaccatggtgtgcagaatattgaaaattcaccactagtagatttatggcatatttctgggtatttcattcccatttggtttattatgataaatcactgggaaacgggtagcctgtaggacatgacagcaaaccacactttggcaggaccagcatcagggctgcgtgcttttttaggaggctatgtagtctagctagcacagagtgacccagtgagagcttggttggctaggactttctggtggtagcccacagagctcacctgaaagagtaccaaggatgaaaatatcatcttggctaattggtctgctagttgatttaaaaaataaacaataaaaaaaatttccagtgtattttagcaaagtttaatattttgaagggggcagaaatgtagcatattttgggatcttaaatctgaatttgtgtctttttccagactttgtcagtgtctttgtctctctctccctctgccccctccatgtctccctccttccctccctccttctctctttcctttcctggtaagtatactagaaaaaagtatatttttttctcattttttttaacttaataacaacagcaacaatgacaacagtcaaactcttgaattctggtcacaatccagatcaataattttttccttgtagttaccttggaattaggttcttagcccctcactgctctctgtatatttctgtacaatattcatcagtttaaataagtacttcaatttcataccaaagtgccaagactatcctattttcactcatctttaactttcttctttttcatttcccacacccctgccattgccaaacaaaactgattatctctgtttttatctttcttttagactttttaaggcaataaaaaattggcttgctcagaaggctgatacactgagtgttagaataacccaaaggttagaatgctttggtcaacttatgggtatttttgatcacgtatatccatttttaaacctgccattcatgatggatcactgaccctggccctggccctgacccatctcaaaaagttactagcatgattactgattaacacttagactgttggcttgaagtttagtagcctgaaggaaaatttccagaggcattataataaggaagtttaattaagagttaatgttgactcaggaatattatgtatagcattgatccacagtgttgctaatgaattcattatgctgcaaatgcaagtgatttgttagtacattggccaataaaagtgaaatctgtctcaacaagaatgttgaaagaaagaaggcagtgaaactttcatctccactgggagtgaactaacttgccaaatctgggtcatcaatcatagtaaaatgttcaaaacaaataatgcatctttcatggttcactgtattcatcagcacttttgaagtcaccagtctagagtagtcgcctttggccaagttttcagtagcctgtggtttaggcaataagcctcaactgtctttctcgaggatatgttcccaggtggttgtactccatgggccattttcaatcaaatctgaaaggacaaaagggcagttctgtttatatgaaatgacatcatattataacctcaaaattgttgtcttaaaagtcaaatcattatctaaaaggtctcttagaattacttagagcttgaatgcaaaagactgaatttcccactcacgtacttcgccaacactcattacataggcaaaaaagtatagtaagtgtcacttatgtgagcctatgtatgtatgtagtgttatagggggtgggggtggcaggaaagacagctcaaatatgaaataattgaattattcattgccactgttctgattgcctttaaaaaaagttttatctggaagttatttcagacacactggaaagcttcatgggtagtgcaaaaaaaaaaaaaaaaccacatgcattcactcattgtaaacattccacctcatttgcagtatcactctatgtgcacatacacacaaatatacatacacacacattgtctttttttctctgaaccacctgagagaaaactgcacacatcatagccctctatccctaaactcctcgatgtattcctcccaagaacaaggacacttttctgtataactatagtctcaaacatctgattgcctttgaattttatagcatgacttatttatacctttttacttcgagttctaactcagatactgagctatagaggaacagctcaactattagttgagggatagctcagatgtctgatggaaaaaagtcacatcagtaacattttgaattctgcaaatatacacaatatgccaatgtatgggagataactaaatactggttttagagaaaatagatgagttaatacaaatagagattccccttaattaatagatcttatatgtttggttatatgtcttatccatgctattatagctagctagcattcattaggacagccagagaatcttgtctttctgtatttttatactgtttttcttcttctgatcagccgattccaggttttgaaagaatgaagtagttcctacttagataatgctattgccttgctccttaacagtaagcagtggagaagcagagtggacgctggtgatgctgcctttagtcctggagggagtgtcaaccagtgggtaatcattctgaccctgcaacacaaccatcccttcactatttcagtgaaggtctctacttcggtggtaggtctctactcaacatggtacttatagccgttttatacttgctatcttaaaaaaatatgcaggctttcactgctgtgaacagataattgatatttatgtttcataatctgtgaagatagctaacacatttctgacagttgcaattttttttcccaaaacgagtttgagcatgcctatccctctctacccaagtatatttaacagcatttctatctattggggaatctgagtgaggatgacaacgtgtcagggattagaatggacaggaagagtctctgtaagaggagggtgtgatgctggagcaatttatgaaaattgggtcccctggtaactgtagtgsatgttatacagacagtcctgcagagtcatccacgaggctgactcactgacaatgtacacatagaggtgggcctcgagtgtgtgcaaataacaagtttactactgcaggcaaactcttcgtttattcatttgacagatttatattgaggggcactgttctaggagctggggatttggtaataaataagatagtcatggtccgtaacctcatagagcttacacataaactgttttgctttaaaatattgtacattcagaggtgtttgtgctccgaccatatgactgcaatatgtcatttgataaacctttcaggcatgacttggacccacccagaacttagctttaaagctatcagattgacaggaggagagaacactggctttagatgacaaatcatggaaataattatgaaaagaccatccagtttttaatgactttacaagaatagtgttcttgtgagactattgaataagaagaaatatatgaacatttgtatcattcaactgtctaactgataccaacaccaataaatatatgaacatccttattattcaagtgtctaatgagtgagggacagtgcctgtaggaaggagagcctcccaacaatggaagcagtgttattcttcatggtagggagaccattttttggttcctcacaatgacttccaggctggaatgatttccaagtagggcagggaagacaaatatctgaagcctaagggaagctccagggtgattcttgtagttttgtttggcagactttctaaaaagcattgtcagatagttttggagcaagcagtttagccatctactaccacacaatatattcaaatcagagtaagctggaagaaagtcatccaacatccaagtctcagcctggcctatgtgaacatacttcttcttaagactaagctgtaggggtactatgcttattacctcggtgtgaaataatctgtacaccagcaccccatgacatgcaatttacctatatgactaacctgcacatatacccctgaacgtaaaatttaaaaaatttttatagatatgttaaatttgagatgtttattgaacatcaaagcaaaaatggtgaatgaacagatatatgacacaaaaaagactaaggtataatcctatatcatgagtgaataggaattttttgttattggtgtttgcgttagttgagattttattcagcagtaaatagagagatttaaaatagaagtggcttaaggaagacagatatttctccttcatgtaaaatctgaaagttggcagtccgaggttaatatggcacctctatccagtacagtcttcaaggacacgtgctctttccatcttattgcactgtgaggtgtagcctctgttgctaaattcaactcaccatccaatatggctgctccgactccagccatcaacttcacattctagccagtaggaaagagaaaacaataaatacaggcagataaaaagatagatgacaaatttctcttaagggaagtttctagcacatcatataatatctacataacgcttctactaccaactcattcaccaaaacttagttatatggcaacacctggcaaccaaggaggctgtgaattttctctattttgggcagtcacatgcttacatgaaaacaggtatttgaaaacaagtgatgaagaaaagcatcaatattaggggacatttagcagtctctgccacaatgttgcctattaataatcctgcatacattttaaatatttaatatcagtctgcaacactctatttgcaaggtaatgtatagtataatctttaccatatgaacttagtagccatggtgttcaggaaagttgtgttattttgtgctagaatattttacctgccctaggtaagggcctaaagataaaatgtgctagactaattaattttaatggcatatagcaagagatttccagcgttaaagattgcatctccacctgcaatttgggaaaggaaaaactgatagcacaaaataaaagtagtgggtgtcctgaaaactgtctgatgctcttcatgttcttaccaactcatatcctcatctaaatttgaatcacaggtacattctgaccttgtcgtagagagagtcctaaagtctcacgagagaattaccgtgcttgttctaacaagactgtgttccagcaggcatgccaaaatttgatagctacaaatagggagatttgaaaggaaagaggtgggagaggtaatttcttttaactcaactgcatctggtggattaaggtagacaatattaccattttgctgacagaaggcagacatggcactaaagagggagaatgagcaaccacagagctgatttaatttccagtggggtttatggaagcaccaaaacatgatgtagccaaatgttcctaaaagtatgaagtaatttaatttgttccatcattacaagaaattaaagccaagcacaattacatcccagtagtaaaaggaacccgctgaattgccattgttattgactaaatgaagtgagatttctgattaccttgtccagcacattttaatttctgtctgtccatttattccaaatcacattacagggccttaactgatcttgacaaaataagctacattattaaggtgcagtttaacctgagaagctttaattactagattagagttttcaaatgggcatgtcttctagacttcagtacatttagggatgtaattattagagattctttgtttctgatgtgcaaaagagacccaagtttaaaaggaagacttaaacttacggaagtgatttttttttttcttccaccaagagtctctttgtagacaggtgtctgttctgttgggagtggacttacacctcctgaatgctgtgattgagagagctgcctccatagtggaaagcccccggtagagggtagtacccagatttccaaggggaggggagttgggggactaaacgatgtacagtgaaccctctcataagtagggtgtctagatgatttagcattcaaaccagaacactttttagaatgaaaggcaatgctattcataattacactggtataacaggcatagaccttggaagttccaggccaattaggatgtatggactctgtacctataaggaagacaaggcaatagatatgtaaacaaatcaatgtgatagtcattataggcatctggagaatgaaaggctctataggacactgtgggtgggtgggcatggagaacagtcactctcttagggatttctctcccctggaacaaaagttacactaatcatgtgacatctcagagcatgaagtttgtagctccctcaaccatattcatattcctctaacagtccagttaatgattctcagatgcattagaaactatggaaatattatagaaaagaagccttaacaggggaagtgtttcatgctttttcagttccattcaacaaacatttattggatacctagtatatgacagccagtgtttagcaccagagatcaaaaaatgaattcattatggttccagccccagagaaattcagtctagtaataaacacataattgtgatagactgtttagtgatttaataacttaaagagttaacttctgatttggttctcatgcatcaaacataatatttgccagtctctatctctacaaggagccctggatttttcccagtcccctactaatgctagataatatggcaaaatacacaggctgatcaggctgttttagagactcttttaagcagagatcttttgttttccagactgctaatttatttttttctacccagaaagcccttcctaccatctgagctattctgaccaaatcagcgaagacaagctacagagatttaggatgtctgggctaaaaaggtttgcttgtttaattagataaataatttgagaatgctttccaggattactgttcctaaccacattgataaatgctgggaagactatctcagttatccagcattggataacagactgttggagaagagtgaagcttcagtgtgagctgggaaagatcccaaaaatcctaacatgctctaggtgcctgcatataaaattcatcatcatagtgactttaggaccacttgctatttttcaggcactgctttacatacatagtcctatttaaataattttcagaatcatactgtgatataggtactgctttctccattttataaattagaaaacaagctaggttaattcacttttataaggtgccaagctagtcaatcagtggcaaagctcagatttggaaacaaggactgccttactccaaaaactgttctcttaaatttcagtgtttgtaaggtccctcactgccccagcataacccagcatttggtccattcaaggattaagaggaacagggatctgccagccttgtttctgcagaaaaaaatgggggaggcagagctggatctaaccaaacaggttaaatttaagtgccaggtttccgtgaaggagaattatgccagcaatggtttctcaccttaatgaattcatttctaaccattctttgccctgcaaagacagcaggatcctgggtccacagggcccagttcatggagaggagaaagaggcacataatgggagcaaaaagtgaagaattcaagctgcaaaatgtaacggaattctcaaagtgctgggttctcttcactcccttatctggcagctcctgttttttctcctttgcctcccacagttgccactttaaaaagtcatttttaatgtggcacatatacaccatggagtactatgcagccataaaaaagaatgagtttatgtcctttgcagggacgtgaatgaagctggaagccatcattctcagcaaactaacacaggaacagaaaacgaaacactgcatgttctcactcataagtgggagttgaacaatgagaacacatggacacagggaggggaacatcacacactggggcctggtgggggttgggggagcaaggggaggaagaacattagtacaaataccgaatgcatgcgggtcttaaaacctagtttgggctgatgggtgcagtaaaccaccatagcacatgtatacctatgtaataaacctgcacgttctgcacatgtatcccagaacttaaagtaaaaaaaaacacaagaaaacaaacaaacaaaaaaactcctttttaaacattgtctcagcgtccagtcggttgagtttctgcacttttagacactcaagccccttctttcgtcctttgctccagtggttgtagcttcctacctccttcttaccctcacccctaggcttccactttagagaatttggagaactggggaaagaaaagactgttttgtgcatggtgtgcctgcagcctagtgccatgagctggttcttgccgtgtctgagccaccagatccactccttctgtggttcacacgctattccctctatcccagccaagcttgcaaactctgatcatgaactaccaggtggaggsggggcatggatatcctccccaggaagcctgtctggaacctctgaacttttctgacctgtgcatgcctctaccacagcacaccttaatttcttttgaaatcactgcatttgttcatttgttagttgtttgcttctagatggtagacgccttgaggccagaattcttctgaactaagctttggaagttgagcacctcatagaataccaagcttctcgtattactggtggggttcaacaagtatttgttgagaagtgatgaatcaagctaaagtttaagtaggcaaagatgaatcacgtcataacctctggtttccyaactttgtctatagaaaaggctccttgctaggtaaaacaaaaacagaagaagtatgtggattctcttcaactttgggactcatcaccctgaatctctcagttatctcaagactgattccctccaccctggagggcctccctgcccctcctttgtacagcagtgaaaggcagaaattgaatagaaggagggaaagagggaaaaaggtctagatgatcaagtggcaaaaacaaataacccagcatgaacaagtatgcagagagggaactctgaggaaacttgctgacaaaagatagagatggaggtgaggtcaaccacaggggaataatgggggcagacaagtctaaggaggtagattttatagggacttcgaatagatgaactgaagtttggggaagacctaaaggcattaaaaatccagtataagttcttgattaaggacagatatcataataattattattataatacaaggggtgctttgggaacataggctatgtaggagggattgacagaggaagggaggaaagatctaggaaaatgagggccaaacggaaaggtgtccttctcctgttcatttgccaatgaaatgcctaggatatatggtggtctgctcctaccctccacagttctagccactgcaaccaggatgcccagcaaccatgtcattcattcattcatatggtctatctgtctcctataggcatttcagtgagtggccgctgctttatgtgttctgttggtaaacttgtagtaccctgagaaaactcacacattatggagaaattacttcaaaaaatatgcacagtagttaactgaaatctttttatgtgttctactctcacgtgaagtagagaagtagagggagagttttttaattataaaaagggaggaagagggaagagggaaacaaaactaacatttattaagcaaggtaatttcttacctcagtgttttcaaaccaattggtagatttcaaaatcaatttaaggggtcacaattaatactttaaaattaaatwaaatagaaaacatcagagtgaatcatacatagtaaggataaatgttatttcatgttaaattatgtttcaattctctgtattggctcgaatatatatttactcttatgtgtatggtatatactgttcctatatatacatttcctttttattttatatatataattctttttattggtttaatttatactgaaatgcatggtttgttaaagactgtaaacaaattttgccatgactattatttataaaacacaagagtttctttaaataggagtccactgctctcctctaccttttaaaaataaatataggtataaaacctttttgtacattttttttatattactgaaagccagcatccacatgccttcaaaagtgagcacctcttactttaaacaaatctaccaggttatagtataaaatataaattttactgtagtttactgtcaataaactttgtaagccactgcttcatttcatttaaacttccccaaaaccttgtatgagtggagtctggggattcagaagaagacggtggtcatcacagaagttgaaattctctactgtttacttcttttcaaaggtcttgttagcggtggccttgaaggtgatgaagaaagacactttcaaggtggacaggtataattattgggtcaccaagaacaaatttgaaaaacaaaatatgccaattgaaattagcatgtagcacctaaatacccagaagcttcttcattgaataatttattcattgaataaattatgtaaactgaattagtaattcctagtgaaatagtggatgaattgagaatagtggtattggtaaaaatggaaaaaaatttttttcttttgagacagaatctcactctgtccctgaggctggagtgcagtggcacgatctgagctcactgcaacctctgcctcccaggttcaagtgagtcttgtgcctcgcttgaggcacaagattagatttagtagagatggggttttgctttgatggccaggctggtctcaaattcctggcctcaagtcatctgcccacctcgacttcccaaagtgctgggattacaggcatgagcgaccgtgcctggccaaaaaaaaaaaacaacaacaaaaaaaaacaaaaaacaaaacaacttaattcataaaacttaattcaacaatttaagagttatacttcaagaatgaagatatataatgaaaatatgaagtcttcagaaggacacacatataataattttagtaaatctcaaatttgtctcaaatcaaaaacttgctacacatatttttgtcttaattatcataattaaaaatgtctacacattacataatactatctagtaaatatgccctagagattgtgtgtgtgtgtgtgtgtgtgtgtgtgtgtgtgtgtgtgtgtgtatgtacacccattatgttttcagacaattggaagaaaattgttaggcaattgtttttcttttatcaaggagctgtcatttaagtgcaaagctggagtattcaaaataaaatttgggcttacaagatcagggcatggcaagacctatccagattgctgtggaataatatatgcttccaaacgctaatcttaaggatgaaaaacacataaatgacatgccttcttccccttgcttaccttagtgactacagtttaaataatctaaaatagcagataccatcaatactgttgctaattatgctacttttcagagaggtacaagagtccttgtacctctagtagtagtgataccactactagtatcaaaaatacaagattgttttgttaattttgaccatgttttaaaaaaagatagggaggagatgaattactattaaaagcagctcttatattttacatgtaatagatgataattacaagtttttaacaaataacacatttaagttgaactgaaccgccaaaaaagatagagatatgaatatatgatttttagattaaagttagttttaacattcaaataaagtgtgggaaaatggcctggaggccaccttctagggaatgtatttttagccctattttacaaaaaagaaaactgaggtacagagaagttaatttgcccaaatttgccccatggttgctaagttgcagagccagcatttgaaccactgttcccaagtcatactctttctattgcttgtaactgtcatcgtagaccactaaagtggatacctccacaactctttgctttccactgcatctggactaccacaatagctccttagtctccatccttctctcttctccattctatcctcttaggctaccagtgcacttatccaattcccacaatatccactagctcaaggccacacatttaagtgttcaactctatatcccttctcctccctggaatgtgtctactccacccagcccatttactgtccacacatacaacctttattcaggctgcagacatttcctacacctgaaaacaatgccagcggactccctcctcccacagccattaaaaccacagtcttccttgaagacctacatccaagttcaccttcttcctgaaacccagcacactgagctatagtccatacctccctctccctgctcgaactacagtagcactcccaggctgaatgatttatatgctaccttacactgtctctaggcagcagccgatcatgtgtctgattttctcagcaggttattatggttccttcctgggcccaggctgctgaatctttcatgttcttgtatttcacagcaactatcacatcagagaggctcaataaatatgtatggattttttgactattctctttcagggggaaaaaaatgagagaaagaaaagaagaaagggagggaggaagattactctctgaccatttctcgatagcatacaaagtcaggaggaagagaaataaaatgtcgttagtggagatttcaaccatatgggaacctactaaacacatgtatttgttaatgttttggagttacctgacatataggtataggtataggaaaacctattccaggtattcttcaagaggtgatagttgttgtgtgaaaaatgcattctaaaatcaaacaggtttagataatgcttgttaataaaattaaatatctcattttgctgtggaccttctagcttttggtaggttcgtgtccattagaaatcactgtaaaaagcctacatatacaatatttcccaagcttgtttgaccacaaaacgtcattagtaaggagaatcttataaggacaatattgattggaacattctttgggaaatgtttgaaatgatcttcccagtaacctcagtgtaagtgatgctctgtcattaaccaatgacaaatacatattcttcctacatagttgacttttcatgatttggtgtggtcttgtaaaagctattctattttgttgtttgtttgtttttgagacagagtctcactctgttgcccaggctggagtgcagtggcaaccatctcctccacctccagggttcaattgattctcctgcctcagcctcccaagaagctggaactacagacatgtgccacacacacctggctactttttgtatttttagtagagatgcggttttgccatgttgtctaggctggtcttgaactcctggcctcaagtgatctgctcgcatcagcctcccagagtgctgggattacaggcgtaagccactgtgcctggtctaaaagctattctaaatcataggttgttcactcacatttggctcagaactggttaatatttgagggttgatggtgatgatggaaaaatagtaactgttttaggattgagaatctgtggaaaaggaaggaaactctcaaatattaactaccttatttaaaattaacttatttaaacaactctgcaaagtggttcagtatacctactattgattgaataccttctatatgtcagatacagcccttggtactttacatttcttatgcatttctcataataaccctgtaattctcaatgtatacaatgtgctcaggtcttttaaatggcttatttcagataatacaactagaacaatggcaaggctggaattcaagttctgagtgactcaaaagtccatgctctttctgatctatcacactatttcccatgaagagctcttataggttgtggattcttctgtgtgtataataactttcttagccaaatctaaatctccatagatattcttgtaaaattataaaactaatttatcttattcgtgtatggagccagttcatatacaactggataagccaaatataaccgatatactcttgagttctgaaatttgttctctataatgcacacacagttaacaaatgtaggtttaccagtaggccaaaatagtttatcactcatatgtgttgcttgtaatgcaagtaatgagattaaaaattgtacataagaaattacctttctgagactctgttcatagcctgtttaaaagggcctagtcttttcrggaaatcttttgtgtgttttttcttttctttttctctttttttgggacagagtttcgctcttattgcccaggctggagtgcagtggcacaatctcggctcactgtaacctccgcctcccgggttcaagtgattctcctgcctcagcctcccaagtagctgggattacaggcacccgccaccatgcgtggctaatgttttgtattttctttagtagagatggggttcatcatgttggccaggctggtctcaaactcttgacctcaggtgatccacctgccttgggttcccaaaaggctgggattacagacatgagccaccatgcccggctgtgtgttttttcttaatcccagtcttcaactggacaaatgtctctttggcattacttcttaacccttaggtatctcatagtgagagagatataaatgctaaacagagatttatgagaaagttaaaaaaaagaagaagaagaaagcagagatagcgattccgaataaaagattctggggcagtgttgattaaaataattgctttcttttcttcactcaggaaagtattcttaacttggagtccttggtgacttcagggaagtcagtgaacacttttagagtgaaaaatattgataatatgaacttatgctcatttttctgggggtgtttgcatcagatgcacctttgtgcattcatctgtttctcccaaacatcatactggtgtattggtgaattcttttaaaattttactctattttgtaaggatcattacatatgaatgatataccataatacttgtcatttttattttaatgttaatatttcacttcagtaagacaccatgatctgcttgaccattaccaaattttggcaatgttagttcctaatactcttttaaaaaaagagaaagagtttgaaagcaaaagactgagaacaagagatagacgagggtgattacatgtaggaagccacacccaggccagtattactgtttgaatctcrtttggaaataaatattcttatctgatagaaaacaagcatacttactgattattcactcacaaatatttgctgagtgcctgtaaatgtcaggaattttctagacagttatagaaaggcctagacacaaatataaaaatgacattagaaaagtcatacaggcagaagccagcaaattatttccaggtggaaagattggctaagatgggcagtcttggatgggatagtcttagatgtaaataaaagggaaaggtattgaaaagcagccgaaaaaggcctatgtgaacagaagtgtgacattaatacaataagtaggagagagttgtgcagcaggttcttaaaagaatgaaacaataaaaccagggtttaaggaagattattctgactttataaataggactgtgttgagaaaaagtgaatccaaggagatccagtagtagaccattatatgaatctagaaatacacagatgagaatttgactgaaggtgacagttacagaaattaagaagaaattggtaagtcaactggcaaagtattggatgggaatatggtaggggtaggagtggagataagcagagtgagtgtaaatatactccagaactttctatttattaatagctttatttctgagaatacctcaatttcaaatagaaaacatgtacccctgaagaacagttgagctaaactcacagaattccaggatcatggtattggatgggatccttgacaagtaactggtcagtttaggaattccctctacaaacatagctgaccccatccaggctaactataatgaacaaccttaaaaccaacacctaacccagatagtacaatttcagaaatcagataataaatgaatgttagagctgggtaggtgctaaagataatctgttcaaactccttgttttctctaaggaatactgtatgcagtaattgacaaaggtgaagaacaaaagactgttatatcctaagattgatagtatatgatggaaacacagatgctctcctacagtccccccagggaaataaaattgattcctaaaattacaacaagaatacgtaaatagcatacataattgtaactttttttaaacctgtttgcaaaaattgtcctgtaactttgttcaaacaacttcccagacaaaagcttcctcagtagcattctttaacaccctctttagtcttgtgttgctgaaatatgtgtttggaatgaaaattatcttagcgcaaacctgtgggtatatacggtctgtactgaatatcaatggcaaagccttgatatttgtcttagctcaagctgctataacaaaataccataaactgatggcttaaacaacaaacwtttatttctcacagttctgggagctggaagtctgagatcagggtgtcagcatagtcaggttctggtgagggcatcttcagggttgcagactgcccacatagcatgtatccacatggtagaaagagagcaacctctggcctcttcttataatggcacgaatctaattcatgagggctccattctcatgacctaattacttccgaagggctttccctccaaataccgtgacaccggggattagatttcagcatatgaatattggagagacacaaacattcagtccataacaatattttcctttgacatttcctttttctttgctcctgagagtttttcctcctaactttctgcagcttctccttccccttcagggactgcttaggattttctccttatctggtcaccaacctcttaactggtctttacttttctgatctgcctttatactattcccagagtaatctttttgaaaagcaaatctgaccatgtgacttcctcacttagaagatttttaatggcctctttagaagaaaatattgtcttagaatagtatacaagtcctccaagactagttctccatctttatctttgtccactgtctgatctaaactttatatccctacctgtttgtagcttcctgaatggcctgtgttctctaagtgaacttcttcagaatgaatccctgttcattccttgaaattcttttttctttctaactaccctaaaaactgttccaggtawctattaagtttctggaccccgaggttatacctaggtattagttgataggctcactaaaattaatagaatgtttgcatttaagttagagacttgagtccaggagaaagtgaagatacaatggaggaggaagggaaaagaatctattaggcaatcaatgcaagattatttaactcacaacctctcacttgaactaaaataacttacaaggctcttgttattatctccaatctataggtgaaataaggccctagaaagattagtagctgaattgcctggaattgcttgtatgaagtggaatagagattggaatctttctccactcttccagtttctttcaaagaataatatcactcacagttgcacacatgtcacatgaagcccccaacctagatgcctaattaaacttagctcaaactccaattttttggacaaaaggcctccttattcttataaaagctttctcctctttctttgactcttctcttatgtcagctcagagagacatttctgcttgggccaatctggccttcaagctcagtcccttcaatgaataaaacaaaacaaaacaagtcgggattttgtaccttcagtaaccttattgacgattgggagaaagggaaaatgcacgggttggagttaccctttagaccaagctgactcctttctcttatatgcacacacacacacacacacacacacatcttcaataaccttattgatgattgggagaaaggaaaaatgtacaaattggagttaccctttagaccaagctgactcctttctcttacacacacatacacacacacacacacacacacattctctctctctctctcactctttcatgcccttacatacatgcacacacagagaccaagctgactcctttctcttacacacacacacatgcatgtgcacaaacacacattctctcgctctctcatgcgcttacacacatgcacacacatacatattccctctctagcaactggcatattcctcccctttcctgtgtagatgaggcacagattagttccacccaaaccaaagctcttcaaagtctcaccttctgtcataaatagctttatcgaacattttaatgcaggcagactctcgtgaaagaaattctggtgaattccattgtttttttctccatcttattacagtatgattaataagttagtgactacaaggttgtagtttttaagagcaagaagtccactccctttcaagtcacattgggcagtccttctgttcatacctgacatattgtgggaacatatgtctgcgtaggattttaatacagagattgtcttagataagaataatcgtcagagaagcaaatggtctataagttatttaattttattcttaatatggtcaaagataatggttgcactgacttcaactttactttcttmaattccattaattgcatagcactagaattttccatataaaataaaatcagatcccatgtcacacagtactctgagtcactctgtgactcctactcttgaagatatagtcctacctgcagatgcctgacatggccagtctttgagatggccagtggctgaggatttctcagatttctccagaatctgttcccctaagcaaggccctactcatggttatttcttttttgacacacacatcttttttttttttttttttttttttgagacagagtttttatgctcttgttgcccaggctggagtgcaatggcgcaacctctgctcactgcaacctctatctcccaggttcaagcgattctcctgcctcagcctcccaagtagctgggaatataggcatgtgccaccaagcccgactaattttgtatttttagtagagacagggtttctccatgtggatcaggctggtcttgaactcccgacctcaggtgatccacccacctcggcctcccaaagtgctgggattacaggcgtgagccaccacgcctggccgacacagacatcttgttcatcataggtctgtgtgcttgctcatcttttctcttaaaaatccttcccactctcttttatttcattcttgaggactcagccttttcccactccacctctgtccctgtctgatttaaatagtcctcttttactgtcccatagcccacatgcttccttctgtgagagtgcactctacagttgtttgctgaaattacctcctctgctggactctgggtaagggacacactcttttcatcatcttgtttctgcagcctctaataaagtgcatggcacatagtcagtgctaaataaatgttgagttactggtgggactaaaagtcaatgaaagccaacctcatgtttatttcatataaaaattctactagaggcataggcaacattcggaaaaacaattgtagttagtgagaagataaaagaaaaagaaaaccgtcacaaaattgcacacatctttcctttggaagctttatgaagtactaaataaagttttatatattttatacaattttaaaatacttcaaaacaataatttgatgccagaaatacacttggagatgagagcagcttgccactagcaaactctgcttaaacctattacatgtacacattgaaagagaatccaaagccttcatgtatttcccatcagataaaatgtatagaggaaaaaaaattaagtcagcaaaagttagacctaacctacacaaatcttttactgtagcaaactaaaggaatgactagctcaaagcaatacacggtgaaacagaaatcattttttccagttctatctactgtagacagtatcaattccttccktagaacaaaggggaaattttgtaagaattaagagaagagaagctggaactggttagggagatttaagtatttgctcttaggagctttttgttgtagttcttttatttttaaaaaatctggatcagtgctcatcatgactggccatcagagaaatgcaaatcaaaaccacaatgagataccatctcacaccagttagaatggcaatcattaaaaagtcaggaaacaacaggtgctggagaggatgtgaagaaataggaacacttttacactgttggtgggactgtaaactagttcaaccattgtggaagacagtgtggcgattcctcaagggtctagaactagaaataccatttgacccagccatcccattactgggtatatacccaaaggattataaatcatgctgctataaagacacatgcacacgtatgtttattgtggcactattcacaatagcaaagacttggaaccaacccaaatgtccatcaatgatagactggattaagaaaatgtggcacatatacaccatggaatactatgcagccatraaaaaggatgagttcatgtcctttgtaggaacatggatgaaattggaaaccatcattctcagcaaactatcacaaggacaaaaaaccaaataccgcatgttctcactcataggtgggaattgaacaatgmgaacacatggacataggaaggggaacatcacacaccggggcctgctgtggggtggggggaagggggagggatagcattaggagatatacctaatgtaaatgaggagttaatgggtgcagcacaccaacatggcacatgtatacatatgaaactaacctgcacattgtgcacatgtaccctagaacttaaagtgtaataataaaaaaaatctggatcagttgttataattttttttgtttttttgagtcggagtcttctgctgttgtccaggttggagtgcagtggcccaatctcagcttactgcaacctctgcctgccgggttcacgccattctcctgcctcagcctcccgagtagctgggactacaggcgcccgccaccatgcacggctagtattttgtatttttagtagagccaaggtttcactgtgttagccaggatggtcttgatctcttgacttcatgatctgcccgccttggcctcccaaagtgctgggattacaggcgtgagccactgtgcccgacctcagctgttataatttgtattttttttttaaattaagggcatacaaatagtgtccaaaataagtggtattttttggacttgttctcttcatgtataccaataggtctatctaggaattatgacaagccgatacagtcctttagcagaccttcaagtgttggcaaagaaactaatgtccacatagttacacatcccgtacagtggatccttttacctcaatggtcaacatcactgtgagttgtgggtaagagtaatggactgaacatttcacaaaaaatgacctcaacctctagctaactgctgtggctctgaggtgattacttttttcctttttcaaaaggaagctgcttcttcagcatcttctcctggagcccctggcacagtttcaggccatgtgtcaggggaacctctaagcatatcactgtgacagaagccaagtgctggcccgcaagaattgaggactgtttgttcacagaagagcctcagcagaatgcgggtgttacatagttcaaaggtgccttgaagaaaactgatgctgttgtagcaggggccttcaaggctcaatttatttctcagttgctgttccatagccctctcccagcctttagggagtttagccaatagtttttgcktgggtgtttttctctgtttagttccttgacttagcaagatttggtgcagttaaagagttttcatgtatttttaaggagagccacagtgtatactactctggcaggggttgaggggaagtattttattaatgaatgcagtatgtgttcttggtaaaagccaaaattaaactggctcactgtttttgtcctgctagctgtcgacatttaggtgtgttgcttggtgtggtgactcaatttcctgtgggatagttggcaactccactttgaggtttgttcggcgggatgaaaaggtcagttacttgatgtcttagaacacttggggttaaaattcctaaaagtgaagctttacaaatgatcctgaaaaatcgtggctagctatattgcctactcacctaggaatttggaaaaaagcaatattctcagctctatgctaatatcaagaataattctttatttgagcaacagtttcacagagcaaactttactctgttagtaattattttctcactagcatgtagatgtgttccagtgatttttcatttttcttatttatacagatgttagaacttaaaatatatgcttaccccattttatcatcatactcaaatcctgtctgtcaaaagtggctggtgcatggcttggacataaaatggatattctgaagtaaattgttcctcctgtcactatactaccttcttaagaacaaatcctgtgtataaagtgcatgatgtcttgaagcattagccaaaactttcctgaattattttccacattaaaaaataacaactgaaatataatgtgtggagccacatcctgttagatttgaagcctgagtctgaamagctttgggaacttggtgaagatggaggaagggggcagtttacttagctactgggaaatcacttgaggctcaggctttgagaaagttggagtgcaggggagaggagccacagaamgccgaacctcagaggggactcccagcttcattgtaaccaatgattgaaaagatggcactgaacaaatcccagacacaatggttatgcatctttaatccactggataggctaactatggacagctcaaatgatcataaaacaagtcaatgtcctcttaaaatttcctacattcctatattatgggaatgagagagagaggaaaatatcaaaaccaaaccatatagtagatgcactaccatggcaactaggtgatgctatacttgcatatggaagttattcagtaaaatgaaaatgattgtgttagagccataggcgaaagtattgtttgtgatctttagggtgtggggttacaatggacttcctatatttgtgtgtaatgcttcaatttttataacaagcatgtaatattttttacattcttagaattggggaagctatacagagcaggtattttatatttaccatttaaaattattaatatctttaagcttgttaagggggaaaaaaaagcttcaatctgaaactttaattcacctggcaaggtttaggcagttgtttgtccatctaaagtatatatttacatagactgcggggtggaggaagtagaacaaaaaagaggcaaattttaacctagagtactcaaagtgaacagtaaatagttcaagtattcttgataacaataagccacgtggcacatgtaacaactactttaaaagttactctaacttttacaaagttcacataaaaagctatctcaaaaatcccaggagcctaaattcagtccatgaactttatttgttgtgccatgttaatttatggagtctaaatttcaagggcagaatttcttctccaatacctgtagattcaaagacaaagacaagggatcccaccacttagtgtaagtttctcagtatcttctttccactcgacaatgacaaagttttatcaaatggacccttgggagtttgacttctcctcactatgaatggtttgcttattgcatgctaatgtagaaaagttctcccacaactgatctgcttagggacagtgtccctggtgccctgggtcagcctttgtaaacagaacaggcttttctgtatgcctttgaatatggtctttccgttttctcaaaattgtagtgtactctgcacatggtgggtagaaacacccttccagattttcttccttggcccaagatcatctaggtcttatgcaattcacaggggaaaggagtagtatgcaggacatgcgtaaattctccttaccatgtggttctttcacattgctgttcctttaagagaactcttaggcaattcggcatatgaaaatgcagcctattgtcaaatttgtgaattataaagcgttccgaccccacaacattgtatattttgtttgcttgtttctgtccgccccaacatttagaagtctggtacttagtagggactgggctgggtagaaaaagaatgcggtcttaattcccacaaccctgcctccttgaagtaggtgaatcctaagcctttagaaacgaacccccagaaaccctaaaacttaaaccctcagaaaccttgagggtcctaaataaccttgtttgtgaaacttcgcaggaagcagccggtcgtggagtcgcagaggctccagcggtctgggcaacctggagggcagtggctcggcggggcgcgcggtggttctagcgagacaggtgcgcggccgtgcgcgcctgcgtgccggtccctcctgagccccgcggcgggcgcgaccccggacggcggactgcaggcgctccacgccgggttttccgccgctctcctagcacagacagtcccacagcagccccacagacacacacgctcgcgcccgcgcctcctcgtctgcacttcaaagcgagtggcgcccggctgcgcsggggggatggcactgcgaggtggcggggcccccggggcagagctcgaggggaaggacgcggcgggtggcacggacagggacaggcttttgcaattcggaatcttttcgtaagggggttgaggaggagccaggcagcgccgagggccgagaggggcgtgagggggagtgttcccggaaagctgcggcgttggaagccgcgctgcgcctgccgcccgaggagttgagaaagaaaacaggaaacgtggtggccgcgcacccggccgcggctgattcattcacttcaagtgccgtgcagaaggctcggcaggcggggcgggcgtggggccgcggctccgggttggggaccgaggagatccggctgtggaccagacgctcctctgcggggcgggcacccaagcgcgctcgccaccccctcgccatccgctagagccgggctcctggactgggactcgggcccgccgcacagttgaaaagtcgcatagtggtttttccgctcgcgtcgctgtgtgaaagttggctcgccgctctttgcacgccctccctggaggccgacccgagacgccaagctggagagaccgtgcctccccgaggccggccgccccgcgagcacagcctccgcccccgttgcactgccgggctgggcaatatgaaggagcagccctcatgtgccggcaccgggcatccgagcatggcggggtatggcaggatggccccctttgaactcgctagcggacccgtgaagcgcttgagaactgagtccccctttccctgtctcttcgcagaggaggcctaccagaaactggccagcgagaccctggaggagctggactggtgtctggaccagctagagaccctacagaccaggcactccgtcagtgagatggcctccaacaaggtaagccccggttctgctgtcactggtgcccccaggctgctgattcccatgccggcgagccactggtacccatagccccgggaaataaattgagaggttttttaggcttactgcatgttggctattctgctccttagagggaggttcctgtttccttgctttgcctcccctagtcacgccagataaacattttccaaaagcaatttgacgtgctaaatttaagtatctcccaagacacagggttcctaagtaacactgagcccttgcagcagaaacccagtagggtccatgggcattgcatgtttaaaggtgttcttgggattcccggttgaaaataagaattggtggatgtctgtgaaatcacttgaatgtcaccacctagggcactcaaactcagaagagttcatcgaacttggaaccttcaccctaattcatctagttgtcagggtaccccgcaagaactgagcctttatatattcagttggccatacatatccgcaggaaacattaacagagttagaaggttccttatgatcattacttttgtttccattaatcttggaaagaaagcccagttttttgaggtcatttagtacaaggaggcttcaactaggcatctgtgccatatgtgctaaggtgctggtcttggcagttaatggagttttgagggctgagaagtaaccttcagcctgggacagccttaaaatagcacggaaggcaaggtatagtgttttcagttttgctgtattttttggatttcctgttctttttgtctttagttatgcaaggagataattggaattgtgtatgtttttagtggctatttgcctgtgcatgtcgtatgcagatggctgaaggattcagccagtaaggactggtaatgttgtgagacaattagtaatagttgcctcgtcaagatatttaagtatttttggccacctatttacaaggtcaagaaggttatattatcttacagttcatctatgtgcacatatctttaaatgagtgatgctttttttttttctacctttctatggtttttatcccacctgttctcatgcagtttttacaaaaaggccacggcataacagccacttgattgtcttatctattaacagtgcttttgtaggtagcattgtcaagtgaaaagttggcttcaaataaataaaaggggctctgtagacacggccagcagatactaacctacccatatgcacactgacctacccatgtccacactgatgatcaatttttttgtcatttgtgcctcatttctaaatttggcacagctcctcatcagaatgaccaattattgctctcttactgggacttttaccccctgctgtrgcattaggcacctttattctcatctgagtaacaaattcttagttttataaaatatagtttgttttcataatttgattctcaatagcagtagacatatgctgaatatgtccagtgtcctaactgctaaatgggagcactttgccatgggcctgagttcttaattctattgtgtggttgattctgtgtaagaaaatgaagagcagaatcaaaagccacttagcaatgtgcaagcattagtgtatrttttcaaggtgattcgacagtagtttttcagctaaatgaatttgagcagctagttactttccctaaaatccatattcttaatgttgagatctatgtttggatttaaaactgaatgtgaaatttaataatgtattgtaaatgacttcagctgtcaaggaattaatctatacgttaagatttaaaaattttttaggtcataataattgcctaaaatgattcctttcttttaaaggcaccagataagacagggatttaaaaaaaaaatctttattatgaaggccccagattagactttgagttaatttacaggtttaataggagaggttggtctgtttggttaaaatgaaatctaggtaaagtgagaagataattttttcaaaatgtagtcattctagcaatgtttatgtcttgtggctgaaaaattaggatattttttcctagcccacgacagagctgaattgaaaaattattgctgtcacactaatttttaacattaaacttagctcagcttaagctgttgcttaaacttttaatgtccaagccattcgtgtcttctttaacttatttatttctaaatcagtgctaagcttacatgactgttatagacaaaaaagggttagcacagaaagaaaaaaaagctcttgctaaaggttgtaaagttacccttcttcttcataacaagggcatgaataagccacatccacaaaagctgtaaactgagttggagcagctgatcggaaggcccctgtgagtgttgccacaccttcagtctgaactggaaatgtgtacagcttgcatcatctccactcagttatttgatatttcttgagtatgaatgaatgagtcagaaacattgcttttcagttgttagttttattaccatccattctttttacatacacgtgttcaaactgatattttcagtttattctcctttagcctttgaaaaattatgacagttttctgtgttctctcttgaggttttaaaaaatttactctaatagattgaaaagcacaataaaaacactagtaagagatcaggatttttaaatggtgatagagaatacttattatggagatggatttaggtattaggaaggaggaaactgattcctcaaacccatttaacaaactgggttaacacattatttctgtttcttagacttctcaataaaaggcatcttagccaattagcagcttttaaatgatgctctaggagcaactagctgtatttcctgtattggtattatatatgtttcttgcttgttgatggcattgaagcaggaaaattattgaattcttggccaaggctagggttggctgtaacacatgtaggatgcttgtaccaagtagggtaagagattccagatggcatttaatttgagtgattaaatctatggcatttacccttataagcacattaatctgcctgagatttgtacagatttcctttggaacctcattgctacaattgagggtaattttagtgaggtctcaaagctttggaggcaggcaaacctggaagttgaattatggttttgtttcttgctaatggagttacattagagaaatgacttcaattttttttagcttcagtttccttagcatacaatgggcaccataataactatcttgaaaagtcagtgtaagagttcmaaagaatatatacaaaagagctagctaatatagtatctgacaatagtaggcactgtatctgttgttattgctattatttgggttttaggtcaaacttcattggttgcctacgtggctaaaatgtctttttaccattcggttgtaatttataccagacacttcaagtttgatggatttttataattcttagataactgtctatagcrcacatttctgtatcataaaaatgcttaaattatatttacagtttttgtggtataatacagacatgaacattctgaagttctaattagaagtttaggcttttcttaaattccagttacagaatgccagacagaagagctaactaagtacttttcctgttttactctaaaactgaaaatgcagaccttactaatttttagaacatgtgaaatgtaataagggttagtggtcaatgtgccttttcagtaaaacaccttttaagcagaatagtttcaccatgtttttggttacctttctctcatggaaagtatattgaggatgggagtcagtagagaggagagcaggacagcggcctgggcctcagggctttcaaggattatgctatggaaccctgtaacgttatcctcttgtgacctaataatgcacatttcaccaggccttccctgtaagttcagtgaggttcaaaggagaaaacgaaatcattttgagttattcccaagacatatcactataaaaatgtattttgtttctgctctaattttgggggcagtttgaggtttggcatggctggaaatgactgtgtttcaagctgaaagtctgtcttgaagttagaatccagaccctttctaagagacttcagatttttctatacttcattccaaatatacttaggccagctttacaaatgtggtcatgacttctttatggaatttattttgtgtatttggcttttggcaaacctctctagcatgtttctgttgcctataaattaaattgctttgctgggtgctttgtctcagagctttctctggctgctccccctactgctttgtaatagtcaatgcagaacatatagtaggactttttgttgatgtattttcttctgggcaagaggggtgttataacaaatataggatcttcatagaagtggctaaatcttaagatatttccacattatgcaactacagtgtaactcaacagatataaatgttaaacttttgctaagaaggaaactaagttaattggaaaaggcatgttagttttatagagagaaaacagcctcagttgttttctacattaacatattaaatcttagattaaaaaagtgttaatatgcctaaatacaaactttaaatttcaaaagaaaatatcttctataattatagaaaatcaacatttagatgttttgagttcgatatctgctttttcatctactcaataaaggtagatttgggaaagatttatgtagcttacatgtagtaccttaaagttaatatgaaagattgagaatcctataatcactgttagaaaaaatactttctttgcttttaagtaataatggaagagggaaacaattttaaaggaaatttttctttcactgaaaagtagagcccttgatgttaccttagcataaaacttaggattaaaacaaatcttaacttgtctctgttgtcatccgttcagttcctgtgccagtatttagtgaaagtttaattattcccaacatttaattatcaaaaactcctaatttttaattattcaataaattaatcattactagataaatttctttttttcagttacattttgacttaatatttggggtagtagtggtaacttctgtctgagagcattatgaactgtctacgttttcgaaaaaaattccgaaacataaggattgcccatgataaaagaagtattttttctaatgttatgggtagattaaacaaactggtatttttctagagagaaaggatgatagataatgcttttgttcagtttaagaagatttctgcgatagttacatagactgtagctatcacttaagatataaatacatgatggatgtgcagtgctgtttatgtcattattttcagtggattcacaaaatatgtagggtttggttttctctttttcagcaggagggaccaactctttttctagaactgtagattgctggggttaattttgtgatagcgtagctctagtaggggagcagtttttacatggctatttgttgtaatagtttaattgacactgttagtctgagatctttctagaatgtagagagatcagtagcactttattttaatattcacattagttttgaaaggcatttgaagaagactttttttattccctgtaacagggattggggggtatgccttgatatttgcttaaacaacaaacaattctgctgcgtccattaggaaattagttaagttcagtgaccaactacaatgacaataggtttattatcttttactcttagagaatagtttatcttttataaagtatttattattattatttagtattcagagcttcttgtttttgttttgttatactttgtatgtgataaggatgaatgatatttactccctggcctggagtaggcaccagtgatacttacagcagctttgtacagtgaaaagaacataaatgtttttcattaggcaaacttggtttcaaattccagctctgttgtttcctatctaatattttgggcaataggccttaccgctctggagctcagttttttcatttataagtggcgataatgaaaggggaaaataaaatgaaaaagttattgagaccattagctataatgtatgtaaagctccgtttggtgcattagcacacactgggtgctcaataaattgcatgtgcttgcctgtctagaatatactaaaaaagagagattaagaaaaactctgtgtcacatatttcttgcaatgtaaaaacataatatttcttagaagaaaaacatgacttttctattctttaagaatttacagtccaaattaatgttgctcaaactttgtcatttttgagacagagtctcgctctgtcgccaggctggagtacagtgatacgatctcagctcactgcaacctccgcctcccaagttcaagcaattctcctgcctcagcctcccgagtagctggactacaggcgcatgccaccatgcccagctaatttttgtattttgagtagagatggggtttcaccatgttggccaggatggtctcgatctcttgacctcgtgatcctccctcctcggcctcccacagtgctgggattttgtcatttctgtgtacattcatatctgctattatatgttgaatgttttaacttaatgtattttttattaatctttaaaatttatttrtcaattattcttaattgacaaatattaattgtatctatttcttgggtataatgtgatttttaaaatgtgtacatcatagaaagatttagtaaagctaattaacatatctatattacctcaccaatttatctttttgtgatgagaatgtcaaaaatctattttagaaattgtaaaacatataatacgttattaattactggggtctccatgcagtgcaatagatcactaaaacttattcctccaatctaactgaaattttgtactgtttgatcgacatcttccatttctctctccctcctcctctacagcctctggtaacccacctttctactctctgtttctgagatcgacttttctagattccccataaagtgagatcatttattaaagacaatatttgtctttctgtgcctgacttatctcacttagcataatgtcctgtagttccattccatgatgttgtgaatgacagaatttctttcttttataaggctgtgtaatctttctttttttttttttttttttttttttgaggtggagtctcgctttgtagcccaggctggagtgcagtggtgtgatctcggctcactgcaagctccgcctcccaggttcatgccattctcctgcctcagcctcctgagtagctgggactacaggcgcccgctaccacgccccactaattttttgtatttttaagtagagatggggttttactatgttagccaggatggtctcgatctcctgaccttgtgatckgcccgcctcggcctcccaaagtgctgggattacagatctgagccactgcgcccggcctgtataatctatatatatatatatatatatataatatatatatatatatatatatatatatatcacattttctttatgcacacttgatgaacacttagattgcttccatatcttggctgttgtaaataaagctgaaatgaatatgggagtgcaaatatctttttgatgtaccaatttcagttcctttgggtgtatacctagaagtaggattgttggattttatggtagttctatttttagatttttgaggaaccttcatactattttcaataatggtggttctaatttacattcccaccaacagtgtagaagggctcccttttctccacatccttgccaacacttgttatcattcatctgtttgaacatagccattgtacatggtggagagcaacacatactggggtctgttggcgggtgggatgggtgcagggagagcatcaggaagaatggctagtggatgctgggcttagtgcctaggtgatgggatgatacgtgaagcaaacatggcacatgtttacctatgtaacaaacctgcacatcctgcacatcctgcacatgtacccctgaacttaaaagttgaagagaaaaaaaaggaaaatagtcattctaacaggcatgaggtgatagctcattgtggttttaattgcatttccctgagaattagagatattgttgagttttcgtttgtttttgagacagggtcttgctcttttgttcaggctggagtgcagtggcgtgatcatgtctcactgtaacctcaaattctcgggctcaatgatcctgcctcagcctcccaagtagccaggactacaggtgtgtgccaccatacctggctttttattttttcgtatagagagggtcttgctattttgcccaggcttgtctagaattcctggcctcaagtgatctcctgcctcagcctcccaaagcactgggattmcrggcatgagccactgtgcagggctggggaacattgtttttttttttttttttttttttttgtatctctgttggccattcatatttcttttttgaggaaagtgtgtctattcagatcctttgtctaattttaatcgatttgttttcttactatttggttgtttgaattttttatatattttgaatattagcctcttatcagatgtatggtttgcagatattttctcctgatccatgggttgtcttttcactctattatttggttgcttgtgcaggtactttttagtttaatgtagtcctatttgtctatttttgttttagttgcctgtgcttttggagtcctatccaagaaatcattgcccagaccattgttgtggagattttcccttatattttcttctagtagctttacagtttcaggtcttatgtttaagcctttatatctcttttgagttgatttttatatggagtgtgagataagagtacagtttctttcttctgcaggtggacatccagttttcccaacactatttgaagagactgtcctctctccattgtgtgttcttggaccctttgtcaaaaatcaattgactgtaaatacttggatttacttctgggctttctatcctgttccattggttgatgtttgtttttatgtcaataacatgctgttttgattacagtagctttataatatattttgaaatgagggaatatgatgcctgcagctttgttctttttgttcaagattgctttggctattaggtctttttttggttcatataaattttaagatttttttctctatttctgtgaaaaaaaaaagacattggaattttgaaaggaattgcattgaatcaatagaggaactgcattgaatctatagatggctttggatagtgtggacattttaacattactaattctttcagtgcatgaacatgggatatcttttcatttatttctgtcttcttcagttgtttaaatcaatgtcttgtagtttccagtgtatagatctttcaccttgttggttagatttgctcctaagttttttgttttttttttttttttgtgatggagtctcgctctgttgcccaggctagagtgcagtggcgcgatctcggcttactgcaagctccacctcccaggttcacgccgttctcctgcctcagcctcccaattagctgggactacaggcgcctgccaccacacctgcctttttttttttttgtatttttaagtagagayggggtttcactgtgttagccaggatggtctcgatctcctgacctcatgatctgcccgcctcggcctcccaaagtgctgggattacaggagtgagccaccacgcctggctgctcctaagtatttttttgatgctattgcaaatgggattattttcttaatttcttttttggataatttattgtcaaagtatagaaatgctaagagcaacttattgttaaatctaaatactcacccaagtgcctcatcttaagtaatggtatacatgaaatcataggtttgatgttcaagttatattttttctgtattttttctaaaattaatgaataacaaaatgagaaaacattcatcttgcaccaccttaaagcattttgcctaccatttactaacactgggcatacttttggacacactagtctaaatcagctgcaagaacaatttagagactaatttattgttttaaacaatcaacatttttccttctttaccctcagttggatttctccactagaggagaaaatggcaaattcgttcagcagaaatattccaattcataaaatattcattccttaggcagaatggtccgtggatttagagcaccctactatagacagcctgcctgaattggattcattctctgccttttaccaaacgtaaattgggccaygttgccttctgtgcttcagttttctcatctgttaaatagttgctgtggtgatttaatgaattaaaagatgggaattgtctcgactgagtcaggaatcatactagatactcagtagaactcattcatttccatatgtgaaggaataacattagtttttattttattattttggggggtgagggttagagaagggtgtctgccatcctgatttctatccttttgataaagtgacctaataatattgatactaaccaaagaggactattataatgttttatttactcttctcccccattaatcactttttttggtggtgttttatatgttttattcctttattttcatccttcaaggagtttgccctttgtttccttctgtaattttacagtatagctcatcaagcaagcctgagatttttgtcagaatatctgaaaatctctgagctttttctagcagaaatgcataatgcagtgcagaagaatagtctagccagtgtttttcataaatgaatgtacatacgttcttcctctgcataagactgaaagtaacccaggcacacaatatcttattaatatttaatattaagaaaagtatattaagaaggtaactctccattctacctctcaacatcttaccatctagtatacacacaaatatttccttgctctatcagccgagagggtctagaagctaccataccccagtagcaatgagcacacttagcaccctcattttggtttctaataccattctctggtaaaaggaaccaagactctttgaaaaaaaatagctgatttctagggactcaggaaggaaatatgtaagatgagcctggagcatcttgtagtgccaaaaagtaaggacctgctcaaacaaatggaaccctacacccgtgggaatatactgaagagttgcaagagcaaactgaaagagctcccaatggccaaagctagaacaatttgagcaagaaaataatatagtattggattatatcccaaagggtaaaataaatatccataaacccatattgatacaatttattaaataaatacctaagtgggggaaaatagacaaatctcctcctgtgcggaattcccaataacttctatagatactctactctcaaggagggagaacataaccccctacaccgtaagtgtgagctgtgcatattgacttccttctaaacagtacagtgtagaaagggaaaaaaaagaaactgtagtggagaawcctatcactacttcagccaggttatcaaggtcaacattgacagtgataagtgataacatgtaccctcgatatgatctgatgaaaatggcacttttaatctgtggtttccctactgaaaacatataaccccagtgtaatcatgaggcaaataccagacagatctcagttgagggatattctaccctcgaaacttgaccagtatttgaccagtactcctcaaaactgtcaaggttatcaaaaacaaggaaaacctgagatacctacagccaagaagagcctcaggagacatgaggactaaatattatgtggtatcctggatgggatccagaacagaaaaaaggaaattacgtgaaaactaaggaaatctgaatgaagtgtggactttgtttaataataatgtatcagtattggttcaataattgtgacaaatgtgccatactaaagtcagacattaaaaatgggaaacagtgtagagtatataggaattatctgtaatgtctacacaagttttctgtaaatctagatctgttctaaaacaaaaagttttatttaaaagatcgaagccatcttttaaggcctatctggaatgttacatcctttataaagcctttttttttaatcccatcttcttcccatcctatatctggggtgtcctatgtctcccacctcaggctttcctaattggatacctttgactttccacagaacttttatttgtaattctcttaactcttagtacaatattttgtgtctctgttttattgttctgatgaggtcttctacggtgtttttagcccaacccagtgagtgtctggtgccttagaccacttggccatcctgacaccctacacagtgagtgtcaatataacattttgtagttagtcacataaattagtacaagaatgcatgatgttggttaatgcaaatgctgttttttaccttgtattggtagatggagagtctgagcattctactttgtgcctttcaagaaaggtttttttctttttctttcagtgacaggaatcctgagcatttctcacttaatctcagttctgcttttagatactcatgtctcagaaattttatcatagtatatgctagatcaatctcatctcgtttaaattaaaagtttgtagtgcacaggcaaaaaccatagaggccatattcatggtcataaactgctctttctcatctctacctattttagcaataacattcttcttattagtttgttccaagtgaaaatgacataactgaatactttccctgctagtctgggaagaaaggatgtgtttgttggcttttgcctgtcagagagtattctgcaatgtttgcctagggcatgcttgcattcccatcagcatctctggtctgctgcactgtaatccctatagggacagcctctggcttttattactgacaagcagtgcactgtgcagccataggcaccataataggaaacaccttggcctgtcataaacaggtctggagagtagaaagtacaggcctgctggggatgtgtccatagcaaagaggcaaagatgcggctgccatattggagtaagtgcaggctaatgtctgccatctccatttcagaaaataactggctgattttgaagctgctttttgtataaacagtagtgttttggttgctttttgtttttggcttaaatatgaataaagccatcttaaagagattatacccttcaaagtattttgagaagatctataaagtattttccttttgttattttacatttaattctacctgatcattccaatccaaacccaatagagaaggaaaaacagatatttcactatagtgggaaattaggaaaaaaagaaccatgcaaaaatacaagtgattgtgtgtcttttaaaagaattacaaatcacactgaattacccaaaattacaaagaaaagtgcatttattattaaggtaacttgtgttgtctgtgcctttacatcaactccaagttttataaaaggagtacattctttgaccataaagactttatatttgttagtgtttttttcaatctttagggaaaaaatgaactgcaatattaatgataggctttgtagcaagaatttaggaagacaataaatttcaaaattggaagggttatcacagtttttaataaagagataaaattatttcatgagtgctttaaatatatataggtgtcattttattatttacaaggaaacccatttcacaaaagaggctaaagactgtaaagattgaacaaagctataatcctgttaaaaattaagataggtttaggaaaactaaagtcctaattttttttttttgaccactttggccagagctgttcataaattaggtaatcaatrtttgttgactagtcccctcccttgttaaaaactaaacacttgtcctcttgtatcttttttaaaaaaatatttcaagtaagtttcaacagtatgctgtgataaggatgaaacctattaacattatccttggtatatattttgattttctgttgttttcttaatcttatattgtcagtatggtttctaagatctaagatctccataagggtaagtgataattgggttttgataaatcataaggaatcttctactagaaatatgtctgtttatttattgtacatcaggaaamgattagtttactttatgccagaagataatgtttgggcctaaatcttaatttttctatctagtgttaatacagtagaatgcctaaaggatatatagaagaaaagacaaaaaaagaagatgaagagaatgcatcattacagactgaatcatcagtccctacagaaggggaatttgttctttcaaaagtagaatttcagcagccgggcgtggtgcctcaagcctgtaatcccagcactttgggaggcagaggagagcagatcacgcggtcaggagttagagactagctggccaacatggtgaaatcccgtctctcctaaaaatacaaaaattagccaggtgtgatggtgcatgtctgtaatctcagctactcgggaggctgagcaggagaatcacttgaacccaggaggcagaggttgcagtgagccaagatcgtgccactgcactccagcctgggtgacagagcaagactctgtctcaaaaaaaaaaaaaaaaaagtagaattcagctgggcatggtggctcacacctgtaatcccagcactttgggaggtcgatcacatgaggccagaagtttgagaccagcctggccaacatggcaaaacctggcctgtactaaaaatacaaaaattagccaggtgtggtggtgcatgtctgttatctcagctactcgggaggctgagcaggagaatcacttgaacccaggaggtagaggttgcagtgaatggagatggcgccactgcactccagtctgggcgactgagtgagactccatctcaaaaaaaaaaaaaaaaaaagtagaattcatgggaaaaattatttgttgctatttagccttatttttaaatatttcagtatattgtctgtttgatacatatgaacaatctgactacaactcattgggaaacaccagtatttaccttaccttctaatgtaaggcatgattccaggtattttctcatacctcaaaccttaaatctctaatttagtcccagaaacagtattctacatgtcaaaacgttttttgttttgttttgtttttggagacaagttctcaccttgtcaaccaggctggagtgcagtggcgccatcatggcttactgcagccttgatctccctggctcaagccatcctcccacctcagcctcctgagtggatggagccacaggcatgtgccaccagaccggcttttctgttttttaatttaatttaactttttttttttttttttgtagagacagggtctcactatgttacccaggctggtctcaaactcctgggctcaagtgatcctcctgccttggcctcccaaagtgcatgagccagtgcacccagcctcagaatatttttaaagatgaaaacctaatgctcagttaaacttttataagatctatgtgcttctaaataagtgtaaagatgactattttctggatgttgtattggtggggaagatggagagatagaagaacaagtgtttattctctggttgtattttctctctctctctcttttttttttttccttgagttagagtcttgcactgttgcctggactggagtgcaatggcgtgatctaggctcactgcaaccttctcctcccaggttcaagcaattctcctgcctcagcttcccaagcagctgggattacaggcgcctgccaccacgcctggctaattttttgtatttttagtagagacagggtttcactatgttggccaggctggtctcgaactcctgacctcgtaatctgcccaccttggcccgccaaagtgttgggattacaggcgtaagccactgtgcccgacctctggttgtattttcaaaatatatccaaataatattttaaaaatgtatttagtgagcactagattccaaaatagcaagagcaatttcagcaaagtataattcctagagaggaatcctacagtacctcgttttgccttttttgttctctaggtcatgtcaggatgggagcataactgacctggccctagttcctaggaggagcatgtgccctctaacatgtgcacagaaggataatagggtcagtgggatgaggagaccaagtgactaaagcagatstgagaatctgagctgtaaaggatttggaggtgggatggagggataaaaccttagtgggaagcagacagcagatagagaagatataggataaactcacggaaggtgtaagcaggttcatgattttaaaattagcctrttaagaggttgtgttggaggtctgttttcttagtgggggcaaagtggcaagggaagtttcacttctgaatagggtggaaaatgaagatataaggaaagaaagagagaaagaggaaagacgtattaggcagtgtgaggcagagaaagagaagagtgggagaaggaggggagtcagactttccttggctggaggcaaactgaccaatgcccgttgctgcccctttccaccgcagggttcatttggtgaaacctggttggactgaacctttaggagaaccttgaagtaaaaaagaaatcccagacaggtcagtggcggatgtaaatgtttaaggaagaacagacagtcagctgtagaaatggagggaggggtagagctgactggagagcgatttatggatggtatatttcatgaggcttgagtcttttttagcactaatagttggcgtcagcttcacctgttgcctccatgagtcatgccctggtagcagaggatggtgggccaactgccaagccatcccctgaaggaccggctgcctgggagtgaggaaaggtggttgatgggctctgagacagcaaggtacaaactgaaatggggtgaaaagagactgtcaaaataagtatgggctgatttgttctaatatatcataggttattattagatgctggaagagtaaaatggaatagaagatgaaaaatgtgaacctttatcttgattccattttaaatctcctaaattctgaggagctttgcaattcctcttctggatataaatctgccctacagtagagttgcaaccttggataaataaataaatttggcctccctgagcctctgttttccctgtaaatcaggactaacataatctacctcaaaggattgtgttgaaaattaagtgaaaacttacataaattatgtagtgtggtggggacatatgataggtactgtggcctatccttaggagggatgaggaatggaactatttttaaacataaaaggtcaactttatatgctgccatataagtaacccagtgcaattggagcttgaatcaacagggctgggagaaagcttacagagtgtgcctttgaaatcccaatacccagtcatggtgatttatgagaccttaccagcttgcatatgtgatggcccactgagtttgtttactttagttttagctcagttacccagcactctatgatagcctattttttatttacactctcactaactcctttattatgatttctttgaaagaatatgaagacagccataaaaaagactcttattgaagttgagagggtctcctgtaggtcttcacttcactgtgtctaaacattggtctgttgcttgtgctttgcttttctctcaccctggatgaccttcaaggctcttccaaatgatttctctgattccctgaaatactgaaattgtgattaacagaagtttcaagtgttaatcaatatcaagatagtagttgtctcttcctggggaaactagaaatgaaaaccaaacataggcctctgtaatcattgcacagattaaaaatgaaaatgcagctgagaaacagaggaatgaatgagaaaaccctaaacctagttctagccccaggatgaggtctttgtcatgagtctgacgctagccacagccggtaagagaaggaattccctagtagtgtagttgttacaagggaatgagtcattttgcaggtaattgttcttcttccattttccacttgctgtcagccactttacagaggagtcggactttgttctgcttaagagaagtctctttccttttattgtttaaaaaaaaaaaaaaattccagaagcccttagaaagagatttgtgagatcaactggtttaccttcttcattcagatgaagtaacaaagcacagaaaagttattttgtcaaggtttctgtcttgtagcaaatacaaactttctggtgttaaacatatgaccctgatttgggtctttactgacatcatcacttttttttttttaattttctgagacggagtcttgctctgttgcccaagctggagtgcagtagcacaatctcggctcactgccacctccacctcctggattcaagtgattctcctgcctcagcctcctgagtagtgggtataacaggtgcatgaccacgcccagctgttttttgtgtttttagtagagatggggtttcaccatgttggccaggctggtctcaaactcctggcctcaagtgatctgcccacctcagctttccaaagtgctgggattacaggtgtgagtcaccacacccggccaacatcatcacttttgaatgaaatttttagtttggtgatgactttattatttgtatttgatccttgtccatttttctctagatctggtactaatttcatgtggaaaataaatcgttaggaggttttcattttgtacgttttggctgcaaacaaccacaacccagtctttaggttttcactgagggatttttgttttagcccaattattgtatgacatgtatctgctccagaggttcttataggtgaaatgagatttttatgtatctgtattcaaacacatagatagatagatagatagatagatagatagatagatagcgaaacatatagacatacctctgaaaatacaaccagccatataatgtaagcctgttgtgtgttaatgaatgatagggtaataatacattatgttcctgtcctgtagaggagttcgagtattcaatacagaggaccagaatgattggtcccagaaaaagtgctccttaagctggatcttgaatactgaggatttatataggcatctaatagggaagaggtggtattccaggggctggataaggcagggtaggatggggtattcatgtggattcgctttattgtatgtttgctggagaggagggtagtgggcattctggaggagtgagcctctctggaacagaggatgtgattataggaccagtggcaggtgtgagaaatgtagattgaggccatactgcagactgtcttaaatgccaggtcaagccatttgcacattgtcctataattcatgaagaacccttacatttgactataaggaaaatattatgaagaaactaaaataaggtgactttagaaggttatatctggtggtagtgtgcaggatagattatatcaaggggaaattgtactgaaagcaagaagaaaccgttaggraattaggtgtaagagtgataagggcctgaaataggatagtgatgaaaagagaggaatgagtaggagaaagattgcacagagaagggtgacagcatacataagacttggcaggaccacagccagaagaaagcatgaaattctaaacctgaataatggacagaattatagttggaaaatcatgaagagaagccagttgggtattgggggagggctggacaatatgacagttaagtttttagacatataatttaggtaaggctatgtatctaagcggaaatgccctataagctttcagttgtcaggactggatttctggttaaaaaaaaaaaaaaaaagagggggcaggattttacttgggtgttgtctgcaaagttgatagctaagaccttaaggctcatctgtgaaacgggagtgacagtgctcattaaaggttattattagaaataaatgaagtaattccaggagagtacataggactctccttgacacatagtagaccctcaataaacattaggttttattattgtttattatgggttttagggaacaacacttttgtgaattattagaaccttatttgggaagctataaaagccatctgcgtgatgtgttttcttagtacaccaaatggaagttcatatgttccattcatatacatgcttccctagctgttaggggaaggtgatagcgcatgtttaactgttgatcactgtttgtaaggcttttcgtgttttttacatatttggttaaggatcttaatccttgagctgtattttgttctcatttgtttgtgtccagagtcaaattaagtttaaggaatttataaagagcttctttgcaagaatgatattaactcaatgtactaaagctacattcacccaaagtgtaatagacttacacaacatggaagaaatccaggagaggcagacagttattcatgaagagtggtagtattcctgtctgcctgtctgtacatttgtcagatcagtgcattctgagaaaattatgccaatttgaaatctccaaaagcattctcagccagtatccgtgattctgatagtttacaaactgttgatagcataagctgttaggaagatattgtagaaattttaatgcagctgttttaattagattgctttccttataacaagtttcagtgtttctggtcacaatacaatttattagctcctgacacatgacactgctggatcaccaaccttaactctgattctctccatacaacccagtatccttaagtaaaatgctgcatatttcattgctggtaagagaggcagggccaagattcgaactcacatgaagccaactagagaagcctatgctctacactattttacatctcataattctcatacactactaacctgttgcaaatgaaaaagaagtcttattattgtaccacttttaattgcacttattattgccttcagtaaagtcttcatttctaaaatgtcttagtaaaacagtaatttcataaaaatattgccaactaggagtactaaattctaattttggttatattatgcggccttggataaggaagtttcttaggctttcatattccaaattattggactattctaaaaacatttttaagtattttgatggatgtagtctattctaatataatgtctttcaagtgtttgaaagttactacttattcaaaactcaactgtctggcagcttttcttatcctgaactctgtgaagaacttcggggacaggaggtaaaatgtctttgaagagtaagaaatccaaaacttcatgtatttacatgttctggtcttgtctcataggattcttctttctccttacataccctcctttaaatccgtacctcccccggtcttctccatcttgcaaatggcaccaatgtccatcctagacattgatcatcccagaagtctaggagttgattcttctcatttcttcagttctgttgtgcaagtcttcaagtcttgtcagttttgcctcaagcacttttacaaactatcctctacagagacagctttacaaaatgtaaatcacatcctatcattccctgctcagaaccttctaatggtatcctcacaccctctggaaggctcataccctcaggacccacgtgatgttgccttgacttgcctcggctctcattccgtagacctgtcctccctcagactggctgtgttactcagcctttgttgagagtgctgtgccccaaatctggttggcttattctaggcattcgagtctcttcccaaataccaccttctcaagtgcagcttttccttactacttaattttatagtcccccatcaatgtacgatgttaccctcttttccttcattgagagtgtttgtaatttttttttgtctgcttrtttattgtctttttgccccataagtccaaggtttacatgaacagggaacttgtctgttttgtttattactgtatcccctatgctggcacatactatgtaataagtgtttgttgagtgcatgagtgaataaccattctaaaaaactctgatgtttaaagccctttgctttatataagaattttacttggaaccctggtattttygtttgtatttgtttgttaataaatgtcaagagttcagtagtaagataggtttcagaaatgctaagttaaacagaataaagaaagaatatgtattacaggtcctggcagagccttgaatatgctaacatttgacagtgggagtctttgagaattatcacatgaagctgctgtacattacaacacattctaggaaatgctgtcttagacaaaaacctgtcatattagaattggggtaaggggcacgatactgaccgtgaggcagcagattcctatggactacattaaaaaaaaaaaaaaaaaaaaagaacagactgataatctagggctcagaaaaaaaaaaaaactgtgatatgaaacagtggcaaaaggattcaaaaagaatacagcggttgggactatctacttttttaatttttttattacactttaagttctagggtacatgtgcacaatgtgcaggtttgttacatatgtatacatgtgccatgttggtgtgctgcacccattaactcgtcatttacattaggtatatctcctaatgctatccctcccactcccctcaccccacaacaggccccagtgtgtgatgttcccccatcctgtgtccaagtgttctcattgttcaattcccacctatgagtgagaacatgcggtgtttggttttctgtccttgcaacagtttgctcagaatgatggcttccagtttcatccatgtccctacaaaggacatgatgaactcatccttttttatggctgcatagtattccatggtgtgtatgtgccacattttcttaatccagtctatcattggtggacatttgggttggttccaagtctttgctatcctgaatagtgctgcagtaaacatacatgtgaatgtgtctttatagcagcatgatttataatcctttggatatatatccagtaatgggatggctgggtcaaatggtatttctagttctagacctttgaggaattgccacactgtcttccacaatggttgaactactttacagtcccaccaacagtgtaaaagtgttcctatttcttcacatcctctccagcacctgttgtttcctgactttttaatgattgccattctaactggtgtgagatggtatctcattgtggttttgatttgcatttctctgatggccagtcatgatgagcattttttcacgtgtctgttggctgcataaatgtcttcttttgagaagtgtctgttcatatacttcacccactttttgatggggttgtttgattttttcttgtaaatttgtttaagttctttgtagattctggatattagccctttgtcagatggatagatagcaaaaattttctcccattctgtaggttgcctgttcactctgatggtagtttcttttgctgtgcagaagctctttagtttaattagatcccatttgtcaattttggctcttgttgccattgcttttggtgtttcagacatgaagtccttgcccatgcctatgtcctgaatggtattgcttaggttttcttctagggtttttatggttttaggactaacatgtaagtctttaatccgtcttgaattaatttttgtataaagtgtaaggaagggatccagtttcagctttctacatatggctagccagttttcccagcaccatttattaaatagggaatcctttccccatttcttgtttttgtcaggtttgtcaaagatcagatggttgtagacatgtggtattatttctgagggctctattctgttccattggcctatatctctgttcttgtaccagtaccatgctattttggttactgtagccttgtagtatagtttgaagtcaggtagcatgatgcctccagctttgttctttttgcttaggattgtcttggcaatgcgggctcttttttggttccatatgaactttaaagtagtttttccaattctgtgaagaaagtcattggtagattgatggggatggcattgaatctataaattaccttgggcagtatggccattttcatgatattgattcttcctatctataagctttgtgtcctcttttattttgttgagcagtggtttgtaattctccctgaaaaggtccttcacatcccttgtaagttggattccttggtattttattctctttgaagtaattgtgaatgggtgttcactcatgatttggctgtttgtctgttattggtgtataggaatgcttgtgatttttgcacattggttttgtatcttgagactttgctgaagttgtttatcagcttaaggagattttgggctgagatgatggggttttctaaatatataatcatgtcatctgcaaacagggacaatttgacttcctcttttcctaattgaataccctttgtttctttctcctgcctgattgccctggccagaactttcaacactatgttgaataggagcggtgagagaaggcatccctgtcttgtgccagtgttcaaagggaatgcttccagtttttgcccattcagtatgatattgrctgtgggtttgtcataaatagctcttactattttgagatacatcccatcaataccgaatttattgagagtttttagcatgaagtcctgttgaattttgtcaaaggccttttctgcatctattgagataatcatgtggtttttgtctttggttctgtttatatgatggattacgtttattgatttgcatatgttgaagcagccttgcatcccagggatgaagcccacttgattagggtggacaagctttttgatgtgctgctggatttggtttgccagtattttattaaggatttttgcatcgatgttcatcatggatgttggtctaaaattctcttttttttgttgtgtctccgccaggcattggtatcaggatgatgctggcctcatcaaatgagttagggaggattccctctttttctattgattggaatagtttcagaaggaatgttaccaactcctctttgtacctctggtagaattcagctgtgaatctgtctggtcctggactttttttggttggtaggctcttaattattgccttaatttcagaacctgttattggtctattcagggattcaacttcttcctgatttagtcttgggagggtgcatgtgtccaggaatttatccatttcttctagattttctagtttatttgtgtagaggtgttattctctgatggtagtttgtatctctgggggattggtggtggtatcccctttatcattttttattgcatctatttgattcttctctcatttcttctttattagtcttgctagtggtctatcaattttgttgatcttttcaaaaaaccagctcctggactcattgatttttttgaaggtttttttgtgtctctatctccttcagttctgctctgatcttagttatttcttgccttctgctagcttttgaatgtatttgctcttgcttttctagttcgtttaattgtgatgttagggtgtcaattttagatctttcctgctttctcttgtgggcacttagtgctataaatttccctctacacactgctttagaatgtgtcacagagattctagtatgttgtgtctttgttctcakyggtttcaaagaacatctttatttctgccttcatcgcattatgtacccagtagtsattcaggagcaggttgttcagtttccatgtagttgagtggttttgaatgagtttcttaatcccaacttctactttgcactgtggtctgagagaaaatttgttataatttctgttctattacatttgctgaggagtgctttacttccaactatgtggtcagttttggaataactgtgatgtggtgctgagaagaatgtatgttctgttgatttggggtggagagttctgtagatgtctattaggtccgcttgttgcagagctgagttcaattcctggatatccttgttaattttctgtctcgttgatctgtctaatgttgacagtggggtgttaaagtctcccattattattgtgtagaagtctaagtctcttagtaggtctctaaggacttgctttatgaatctgggtgctcctgtattgggtgcatatatatttaggatagttagctcttcttgttgaattgatccctttaccattttgtaatggccttctttgtctcttctgatctttgttggtttaaagtctgttttatcagagactaggattgcaacccctgcttttttttgttttctatttgcttggtagatcttcctccatccctttattttgagcctatgtgtctctctgcatgtgagatgggtctcctgaatacagcgcactgatgggtcttgactctttatccaatttgctagtctgtgttttttaattggaacatttagcccatttacatataaggttaatattgttatgtgggaatttgatcctgtctttatgatgttagctggttattttgcccattagttgatgcagtttcttcctagccttgatggtctttacaatttggcatgtttttgcagtagctggtactggttgttcctttccatgtttagtgcttccttcaggagctcttgtaaggcaggcctggtggtgacaaaatctcagcatttgcttgtctgtaaaggattttatttctccttcacctgtgaagcttagtttggctgggtatgaaattctgagttgaaaattctttyctttaagaatgttgaatattggcccccactctcttctggcttatagagtttctgctgagagatcagctgtaagtctgatgggcttccctttgtgggtaacccgacctttctctctggctgcccttaacattttttccttcatttcaactttggtgaatctgacaattatgtgtcttggagttgctcttcttgaggagtatcttcgtggcattctctgtatttctggaatttgaatgttggcctgccttgctaggttggggaatttctcctggataatatcctgcagagtgttttccaacttggttccattctcccatcactttcaggtacaccaatcagatgtagatttggtcttttcacatagtcccatatttcttggaggctttgttcatttatttttactcttttttctctaaacttctcttcttgcttcatttcattcatttcattcatttcatcttcaatcactgataccctttcttccagttgatggaattggctactgaaacttgtgaatgcatcatgtagttctcatgccatggttttcagctccatcaggtcatttaaggtcttctctatgctggttattctagttagccatttgtctaatcttttttcaaggtttttagcttctttgcgatgggtttgaacatcctcctttagctcggaaaagtttattacccatcgtctgaagccttcttctctcagcttgtcaaagtcattctctgtccagctttgttccgttgctggtgaggagctgcattcctttggaggagaagaggagctctgatttttagaactttcagcttttctgctctggtttctccccatctttgtggttttatctacctttggtctttgatgatggtgacgtacatatggggttttggtgtggatgccctttctgtttgttagttttccttctaacagtcaggaccctcagctgtgggtctgttcgagtttgctggaggtccactccagaccctgtttgcctgggtatcaccagcagaggctgccgaaccgcaaatattgcagaacggcaaatgtagctacctgatccttcctctggaagcttcatctcagaggggcatctggctgtatgaggtgtcagttggcccctactgggaggtgcctcccagttaggctactcgggggtcagggacccgcttgaggaagcagtgtgtccattctcagatctcaaacttcatgctgggagatccactactcttttcaaagctcagttggaaatgcagaaatcacccgtcttctgcatcactcatgctgggagcagtagactggagctgttcctatttggccatcttggaacctcccccagctatacctactttattggatttttgtgtctccatcagctgacatggtacttacagcctagaatgagcatacaaaggatactcattcgctattcgatgatgactgacaaacagtctcccaggatcaccatgaaataactaaactgagtttgatttatttaaaaatcaggtccaggtaacaaactgcacctgtccccttgaattgatacaaataaaaataaaacaaaaaaggacaatattttactttatggaactttttattacaaagaattaaaaaaaaataaaataataatacttaaaagaatactttgactattattttatcacctaaaggcttctcttattattttatttttggagacagaatctctgtcaccccggctggagtgcagtggcgcgatctcagctcactgcaacttctgcctcccgggctcaagcaattctcctgcctcagcctcccgagtagctgggattacatgagtgcaccaccacaccctgctaattttttgtatttttagtagagacagggtttcaccatattgccgaggctgatctcaaactcctgagctcaggcaatctgcctgcctcggcctcctaaagtgctaggattacaggcatgagccacagcgccctgccaacctaaaggcttttcacaactgggaattcactgaatgttgtatcattaaagctaatgtggaccttggataactgtatgcctrttttctgggaaataatggtggagctctttgaaagggtaaaaatggtgttttatcatacataactatgcctgaggtttttgttttgcatttatctttgggcaaagttgtaaagttaagcaaatctggaattgaaataatttgataacatcagctaatatttttcaaagttagatttttgaggtataatttacataagagttactctttctagaggtatagttgaatgcattttcacaaatgtgtacaattggataaccaccaccataatctagatatataggtaatgtgtaattataatatatatgtactatataatataggatatttataccacccaaaaagttttctcttgctttttatagtcattccccaaaccccacgtccagtgctgattgtccctatggttttgccttgccagaatgaataatacattaaagatatagccttttgtgaatggcttctttcacttacaatacttttgagttttgagttgaattataagtttcacttataatacattttgtgttattgcatctattggtaatttgtttcattttattgctttttagtatttcatttttttccagtatgtcattttatggacacaatttgtttacccattcaccagttgactgatatctgaactgtttctgggtttctgctatagagagttgctataaacattttcatataggtctttatatagacatatgttttcatttctcatgggtagatacttagaagtaggattgctgggtcatatggtcactctactttttaactttataagaaactgtcaaacctttttccaaagtttctataccattttgcattctcactagcaatgtatgagaatttaatttgctctgcatccaggccagcattttgtattgtttgtattttgtattttatacattctagtaagtatgtagtgtggcatctcactgtggttttactttttgtttccctaatgtctaatgatggtcrtggatcttttcacatgcttattgatctttttgattcttatgaagtgtttgtttgttcaaatcttttgaccatcttttcactggattgtcctcttattgtgttgtaaagattttttaaaaaataatttctggatacaagtcctttatttgatatgcattttgtacatattcccttctcaagtctgtggcttgttgttctgttttcttaacagtttttttcaaagagaaatttggtaaagtccagtataccatttttcattttatgcttcatgcttttgtggtttaagaaatctttgcctaacgcaagatcacaactactttctactgtgttttcttctagaagttctttagttttagattttacatttagttctatgattcatttcaagtagatgttagtgtggtgcaggataaaggttgaagtttcttgttttatgagtggatgctcaattgttcaagcattctttgttgaaaagaatatcatttctcttttatagctcaaattttattacttaaaattattttaagatgcacatattaaagtgatatgtgtaaaagattatatatttctggaagcatgcctatttacactagttattattactttaggagacagatattctctttgtttaaattgtttccacaaagcataccacgaagtacagaggggacattagtaactattttatgatgattatggtattcatttaggccaatttaagtgaattggagatcctaattttctctataaggagacaatactttttcatacaagattatttttgtggaggcttcatttatgtgaagtttttgcacccatttattgtcatgattattcttcagtgaaacaaaagtctgtagtagatatgctgctgctgctggttttaggtaaattgactaaatagttatacaaaactctgtctctaccatatatgaattcaaactgtatcaacaattacagaatactatgctaacatctaataagagagttagcccatgtagaagagaaatataaatacagctatcagatcagtctcatgttatttcagcttcaaggagcctcttagcaaaaatggtttcctttctccatacatgttgcaggtgtttactattttaaatgagacttttttgttaaaaaaaaattaaaataagatcatttagagaacgattctcagcttgttcagatgattatttggttttaaaaaagcagcctggagttcctcttaatctcaaatctccataaaacttacaagagatgttttcatttactgaaaggaatagttttttcttaatcaaatgtagagccattatcactagagggcagtaaatacaaacagatttagtggatttactggcactaacgatgttttcagaatactagcattaatcaaagaaagtatagtttttataatatgaaaatacatgtaacattctgttatgtaaaatattggttatgaatcaattctagattattgtctgcctctaaaatatttttaaggcatttgaaagcaaagggaggctgagaaacactagttttctgtggctattctgtttaatacttgaagtttaactttgcctcagaattcttcaagggacatttaaaaattagatttgcatttgttcaagctgaacagtactggatatatgagagaccacgttatatagatttgcttcttgattaataactaccacgacttttaattttaaggtgaaaggtgtaaaataaatgtagattgattataggataaaatattttccaataatgtaagtcctactgcaaacagtgctactgcctggaaaactccttatgttggagaggtccaagagctaatacacttattttaaacaatatttcttaaatatttcaaacacagtaatataatatacagcttagaattgattatattaacggatctattatgtaggctctaggctaaatataaaataatgcctgaaatagttttctttttttggcaatttagagtactctgaaaccagacagtctgggttcaaatcctggccctgttacttactactggctttgtgaccttgagcaagacaacttgacctctctgagccttagtttccccataatttagttttgtttttccctattcaaaaatgcatcttttctctcttgacctctgttacaaagtcaataatgacagcatgtgttaatgtatcagcagttcagctccatcagcagaatttcaaatatcctgaaatgtactgaaatagttcaaaaagattgttaattgcttgggtatctggtaaggactgagaaaacaaggaatagcagggaagtggcctctagaaattctgaggggtatttctaggaaaagtctgaaaaagagaactaactgaacattatgggaattttttttttcttttttgagacaaggtcttgctctgtcatccaggctggagtacagtggtgcaatcatagctcactgcagccttaaactcctggcctcaagccatcctcccacctcagcacctcccacctcccacctcagtagtatctggaactacaagcacatgccaccacacctggctaatttttaaattttttgtagagacggtggtttctctatgttgcccaggctggtctcgacctcctggcctcaagcaatcctcccgcattggcctcccaaaatgttgggattacaggcatgaggcacttcaccaggccaagaaactattttttctatttcaacaaacacacttgcatatatgtatataaaatcatttgggcatttgagagcagtggattacagataagaaacctgagctctagctgtaacgctgtccctcaagttgtgttgtcagaacttttctggacctcagttccttgtctgaatgtgtcgtcatcattacatctgcatatgagggcagctgtgtgttgttcacatagcgctcccaaacataagcgtgtctcactatatggcagggctgtctgcctgtgggcacctgcttcctcaccctgtccagagatctgaccatggtgatagtaaccatgattctttaattcaaggcactgtaaagttagcaaaaagattgaggataaacaaatccactcctagattcatactgtttatcatagagtttgcatcagcctaattatatgatgagctgtcatacaccattaagagcaaggactgggtttgcatttcaatcctgtcacctatggagcaagttattgaatatgtaagaaggtccatcttttcatgttaaaatagggataatatttatcttatcagaatgttgccaagattagaaatgaggtatgtaaagttctttgtgcatagtaggtgcctagtaaatgttgtaacttattaaagtttcttcattaaatttggtgaagccaagtctgactataagaattgtatctctctggctctattcaaatttctcttctaaattatctagattctctctgcagatagcagctaccgtggcaataggaaggagattctagtctcctagaaatggagattagggaaaatgaaatgaattttaatttggctcagagatttttgaaaagatttcttattccctagaaatatggaaactttccttggtactttttactcaatatgattaaataatctcccttattgcagcaaattagggacttatttgaataagttaaatcctttcacatccagcacctattagaatgcctggcacataatagttgccaaatagaagtctgttgaatgaagggaccatcactcacattcagcagggagaagaggctgcagattttagagggaagggaaactgtatgtgtgtttctgcataatgttttaagacaaggagtattatctactatatgtaatctgttttaaatgtttttgatgattttgctgagggtgaaaacccttgtcctttcctgtcacctataatcagtataaaaatattgatgttttgcatctgcatcagccaacaatctttttgtggcaatagtacactaccttgagaaatacagggacataataagatacttttctggcctcaaagatcctccaccctggatgaggagtcaaagttgaagacagttgaaaaaaatagaacagtgattcttaacactggggaacattcaggaaatttcaggggacagtgactggggagtactcctggtgcttggtgggcagaggccagggaggctagatgtcctgggatacatgggacagcctttcaccagggaggtttgctgtgtgtcccacacaacttccaaaaagtcccagcagctattcacataggtgaaaaaacaaaatgcatttataattctctgagcctagaacccaactactttttacgtataagtattaaatatttttacatggttttaatccacaccaaattttctagtaatgcagcaatagtgtatattgtgaagatggcactttgttacatttgaaacctttcaaagaatcattcatcatatcaggaaaaaggaaaatttttctaacataacacccctgtattcattttcatgctactgttacttttgtggtaattctccccataagagaaatcatagcaaacccttagatagcacttactgttctaagagccttatgtatatgcactaatttaatcctcacaacaaccctgtaaggtagaaactattattctcattttccatgtgagtaaactgaagtatgggaaatttaaatagcttccccaaggtcacacagctaatcagttatagtagtttttgactactttttaaaatgtagttgtgtacaagtatttatattttgtagtatttgatagaaattactcatttctcctttatttcactgataagccattatactgattttttttttaaatctatgtagggagtatttagcctatatgtattcagtacagtattatgaaggaagtgtatttaggaatttcatttcaggatgaatacttgttataaaaagtaaaaagtaactgagtcttaagtttgtcaaagaataaaattgatggatggatggatttttttttttttaaaggagggggaaggcagtgagcctgactgcagagtgtaatttgcatttaaatgacaagtggtatgacacttccacctgttcttcagggagcctcaccaagtatgttttgcctcgaggcctttgcttttgccattcctcacttggttttcccttctctaccctacctctcaccccgcaatccacatggcttgtttcctttcttcagatctcctggtatacgtcatctcatcagaggggctttccatgatcaccttatagcaacctctatccgtaatccttatcccttctttctctccattgtgcttatcaccccatgacgtattatgtatttattaacttagttttggaatataagctgcaggtgagaaagctttgtttctctttctcaggcagtgcctgacatagagtaggagcttaataaatattgaatgaaggggcagatgtagaatcgttagaatttggaaaaaggctggaatatttggtcctaagatgtactttgaatgatttaaatctgactgagaaaaccagtttgaggttggcagagtagaagaaggagggtattttaggccgagaatttggtaagacagagatgggattgtcagctgtatggtgaaggtggaggartactagtctttcaggaacagagcaaatgtaatagagcagctgaaaataggcttggcgttggggattaaggtcagatatggcagtctggaatttacagagggatgtgatgaagcaggcattactagctttgaagtaacaggctgcggctggatttgaggaaaattgatctggcagtagaggtcaatatgagactagaaggggaaaagccaggggcaagaagatgagctaagaagcaattacagcattttggccctgagacatggagtgctgtgatgcaattgaaaggaaatataacatatatattttaaaaacaaatgacaaaccagagaatttttttaaatattagtataatagaatgattatcataatgatcattgtcactgtcatctttactgtctgatacctacttatcttcaactttgtaccatttgttgttttaagtgctttgcatatatggtctcatttaatcctcatatgtatctgttctggttatttattgctatgtaagaaatcacttcaaacctaatactttgaaatatgaatgtatttttattagttttcatggctttgtgggttaactggtcttggctagacattcttgcttggcattcctcatatggttgcagcccagtgggtagctatctgaaagctgaactggctggatggctaggatggcttcttgcccctcaggtctggctctgggctggggtggctggcattgctgaagactggccaggcatgtgtgctctttcttgtgcaagtgctctcttgcgctttctctcttcactgtctgtgaagttaacatggacttcttgtagcatagcctctcagagtagtcagacctttttttttttcaacctaatggcttaggggtcccaatagcacattcaaagaaagcaggatgagagctgcaagatttcttatgacttagcctcagcagtcatgcaccatcacttgttggttacacaagccaactcagattcagtgtaggacagtgtggctcattaagagtatctttggagactagctgccacagtaatccactttacagatgaggaagctgacacactaaaaagattatttgtcagtgattgtgcacaaaagatttaaacttgcaattcttgttctcagtaccagagtgaacctgggaaaatcattttttctctctaggtctcaactttatgtggaaatgagggagttagagggggtgatattaaagttactttctatttctctcagtcttttaaatatttggattcagattacgggaggggtaatggtaaggaayaaactgaaagaaacagctctggataaaagatagggcttgctaacaaagttgaatgaaggagggaaggtgatgccgtataggggaacatgccgggttactcaaggattcagctagatggtttatattaaacacctgacagtgtctgacgcacatgaaacacctgttgaatggtaggaaagagtcatagattccatctgagatactggaagaaatataggctcactgactgaaatggaagtaattatactaagaactactttaaatagaaaaatgtctcacagttttgaaaaagtttgtcgtgactagcagggcattcgagaggagaatcttgtattcagaaatatggcactgaagttcaagttagaagtggtcattgaagattgtgggcctagggaaaattaaagaagttcaggatcctgggagttgagggagagtagtaggaatgatcaaacatgtggaacacttcagagaagtagggagaccagagaaaaggaggaccttagtattcctctgggggtagctttagtggaatgttggagctttaatttcttccttttgtagaggagtaagagtgatggaaatgaatacaacagatgttaacaaaagcagaggactgtagcagctaaaggccaatagaaactcagagagacacagtgttacaggagtgcttatcagagagcatgctctctaagacagacatgccacatgtggaaatagttaaatgtcaggaagactgcagagtagccataccagcaagttaaagcacagagtagtaagcacaggctttgagatggagaggaggtaaaatgcacagaattatatgctaaaatcaactaaaacctagtttttccttgtttctcacccacaagacctctttagtattaaagttacagggtaatactacaccaaaccaaatagaaaatgctgtttttctagaaagaactttgatttctcatttaaccctcctcgtaaaatgtctgattactcttgagctcaattctggattcctaagagccactcattcctttcttaactttgtgtacagttattaaaatgttctgttctggctgggcacgttggctcacacctgtaatcccagcactttgggaggctgaggtgggcagatcccctgaggtcaggagtttgagaccagcctggccaacatggtgaaatcccgtctctgctaaaaatacaaaaattagccaggcgtggtggtgggcgcctgtaatcccagcttctcgggaggctgaggcaggagaatcgcttgaacccgggaggcagaggtgacagtgagccaagatcgcactactgcactctagcctgggcgacassgagactctgtctctaaataaataaataaaatattctcttctgatcaaaatacagatcctgagttctatatacaaaacactgcattccttatgcatacacagtgccctagctttcacatttccctccccccagaattgcaagtggtcccacccctagattttgaaggttttagaactctgtcatacataacaatagaaacaaaaggagctgagagcagccatgscacacaggtgagggaatgtgtcattgccatctgtgccatctgtgaattctggacattagtcgtattgtttaatccctatgcttttatgttggatgaggggagaactacagtcatttctacatcaccagggagccacttgttttggatttgagagagggaagcaattaaaatgctcgattgccatttttggagcagtttttatttggaaggaagggaagccagaggacattaaaattcatagaaaatgccctccaaaaggatgggcaattcttaagaatgaactacgaattttgaggagttttatggtcattattcatcactgcaagagggaagccccgttcatcttttctcagggtggcctcagagctgcagggataccattattcaatggcgtttgtcgggtgaggagaaagcctccccagaggctggcccttgccaaccaatcccaaagcagcctgcaccgaggccacaccccctcgccttataggctaagagctggaatgcaattggtgcagagttggggttttatgggaggggcttcttgtcactcttcccggcttccctgcagttccttatttggtagcttttgacaggactagcctttcttgcaactaagcatcttgacatacattattcattaagccctggagctcgggagagaaagatgcagacccttagatctttagatattcctttatcacgtggattttctttattcagaatagttgctgaattttgtgccattctggagtcttacaaatggcatgtattcgatgggaagacggctggatgggatttaatgcgaggctttcttatgtatacttaattaccaaaaatctttaaaaactcatactctgcgtggcttgtggaggttgttaaagtgtcgagattttgaagctaaatacattttagagctkwctatatatatacatatatatatatatatacatataatcaatcaaaaatgcctgaagcaaactatttactgtcagtgtcttggggctacataaaggtaagacttacttagcttttgaaaactccttactctgattacaaaattatttagaaagcttagactctactgtaatttgttcaaactatcagttatgtattctttccttacacatgaactaggaagaaatacgtgttaatagtggtcaagataagattgtataactttcatcagttgtagtttgagtgttaaaatagctkttttagatacgcagtagttcttctgtttgtcatgtggtatatgtttgaattgtgcttgaaaaatatatggtaattaaatacattcattgcaaataaattattgggccaaattacttatactgatttatggattccagttagtatgttgcacataaagtttataaaattaatttgtggctgtttctaaaaatctatactactttaacctgacgaggaatacgtttttttcacctttagctataaagccctaggtgacattaaaaattgacattacttaactatgtaagtgatactaaagtgaaaacttgattgtctattatacttgcaaaactgaacaaagtttttattacactgttttgtgaatctcaagaaatgaattaataaacaattcaataagattgtgtccatgcttggcaggctttttccatgccctgtggtaacattagcattgtgatcctgtctccacaatagaaggaggtagaaaaaccttattcagtcctaaatgaaacatcacttcacagatttttggtatttgagccactcgcttgaacctgggagccaatcacaacacattttaaaagattcattttctgttactctgaggatttttcagattggagtgtttgtcgtttgctttgtttctttctttttgaaggacaagttcccctttgttttagagatttacttgaattctaaaaaaattagaaaacttatttcagtcttggttrtccaagtagtcatgattccttacctccctttaaatctgtggatgattcagatttttaaaaatgtttttaaaatatatagacttccattatttgaattttgttagccatwtcttggctaaaaatcttcagaaatgcagaaaagtatagagagtaaatataagawgccctcattatccgccagaattcagctcctagcttttagccagctcacaactgatgttatttttgaagsgcttcacatttgtactgtgattatgaaccatttgtactatgattatgaacaatattgccaagaatctacatatagaattttagtacgtttctttttgaggaaaatttttcctggacagctttatgtttaatactgtacctttaaaaacatgtaaaaatagcaaatatagatatatttggtcttatgcattttgaaggttttatttttataccatcaatggagtatttgtttaaataactttgaatactgatatctaccaaacttgtaatgcatcacagtgcagcatattcaaatgatttttagcagaatattgtcaggaaaaaataagaaaattttcttactattggacccataccacctccttaaatatatattgggaggatatataatatacccagtagcacactggcgtgatgtagaagtaaaggagattacatttaaggacattttgttttattattttagtttgcttcctgaacaatcttaaatgcctaatgtaaattgaagaattgcagttctgaaaagcaaaatacagtattgagattcaactgcatttttactttcctttatgccttaactgctgtacacagacattctgatgtataatgagaacaaaggattcaaaagcattcacttagaaatcctcccctgtttttttagttgcaaccctaaatctgtgtattgttttcagactacttaggccaaaaacaattagaaattcatcaatggaaaatatttagaggtcacttaaaaaaataaactaaatgcttaaatggttctgcattttacaatcggttcgtttcaaacagcagtttaatgttttgtcccttctaaatatattaattgagaaatatgatgggatttcccagaagaatacattgtattagctttaaatcagtccttccccctttggtaattttatgtagttatcttagtaaatattatataattatttttagatgagagaagtatcacatttttaaatgtttgttgaatgatctagtgcatttttttagtacatctagctatgcactccaaaaccaatttgtgagatcaactaccagttgagaaagcacttatggtaatttttgtggttattcatttagctttgctggactgaaacttttatatggatagcaaaaaaggaaaacaatgttaattccttttagaaaatacccttgtgttataacttaatgtacgcttcagaattatctttaggaaattccttagaccgtcttcctagagtagagaagtaattgcttcaaatattgtcttttataattatgttaaaatgaaatgttgacttccttggagtcccttataagccttggtagggaggtgggcatgtgatggaggatttctccaatccatgtttttgtgttttaaacaaaggctggaaagtactctgggaataatgtatatgaccagaaagatgaacatgcaggatgtcacttatctagtctgtacaatatttagattcctttcactggcttttttcttcagttatctgtactaactggctattttggtgaattgtttaagcaaactgccaggaaaattatacttcgttctttatattcttttagaaaaatccaataatatatgtagcatatctgcaggtagcatccacatgttctctttgggcaacataatccttatactagtttgtgtacaagttagaagataaacctgtgataactgggtctctatctatctttatcaatcactcccagaaggcttcccttgttttgctttattgagagaagtgcaaggagggcagcagttcctgtatagactgctgagattctagcaatggtgaaagctttgcctcatctcctatcttttatgaaaaaaaagactttgtcatgaccaggtagttcttaatagcaacttttagctcataacatgaacaattttaggtcaaagagatatttcattgaatgtgtgtttaaaatgtttagcagactcttttctttggaatatgctttgcctaatgagtatatttttccaagtgtgaatttatctgtaaagcaaattttttttaattattatactttaagttctggtatacatgtgcagaacgtgcaggtttgttacataggtatatacatgccatggtcgtttgctgcacccatcaacctgtcatctacattaggtattttgcctaatgctgtccttcccctccctacccgctsataggccctggtgtgtgatgttcccctccctgtgtccatgtgttctcattgttcaactcccacttatgagtgagaacatgtggtgtttggttttctgttgctgtgttagtttgctgagaatgatggtttccagcttcatccatgtccctgcaaaggacgtgaactcatccctttttatggctacgtagtattccatggtatatatgtgccacattttcttaatccagtctatcactgatggacatttgggttggctccaagtcttaagcaaagagttttttaaacctgtgtatgcatgacattttagctgtgcttttgagacatagctatggtttcccatactaatgctattccaaattctttatgggatttgagaaagaggagctagctatttaagtaactatttttatggttataactacagtcaaatccttcatctgtctgacctgcaatgataaaaatcagctatttactttaaaaggcccaaaagttatggaccaagtgccagaaagtgagctgggagaaagaactcaaataatattgagcatctactatgtgccaggctaaatagaagacacttctatattagcycattaaattatatgatagcccataatttactcaagaaaatataactttgtaaagagggacagaaaaaattttgaactctattataaatgtctacaaatattcttagaaggcccaaagtttatttttttcagtaggttataagatataatgctgagtgaacacaagcagtaacctatgttctgtataccacctgatgccagttttaaaaatatgtattcacatacaagggtagaaaaaaggcataaaaggaaatttaacaaattatctgtggttatcttccagcagtggggatttacattattttcttttttttggtatagctttctacattttctatagcacatgtacattttataattagaaaggagttataaaaacatatgaacaaagaagtgaatttagtgttcctgagtttgagactaagctttctagaccagtaatttaacaaccagaatttgtactggtcatgccagttctttgtttttttgtttgtttgtttgttttttccccagcatttattttatttttattatactttaagttctagggtacatgtgggaattgaacaatgagaacacttgggcacaggaaggggaacatcacacattggggcytgttgtggggtggggggaggggggagggaaagcattaggagatacacccaatgtaaatgacgagttctttgtttttgactacgctggcatgcgaatacacatttctctcatccaacagtccattgaaatggttgagggttttttgtttgttttgataacagttaaatgcggagttaaaacttaatctagatggtctataagattgactttggaagttatttagcaaacggtatagagttaggccatcttggtatgaattatgcagagaagcaaaataattctaaataattaaatactaagaattatatttcaaacatcactaaaatatacattcaacacttaccttcatacttaaatgagaatttatggtgaaatttcaaattttaaaggctaatctgatgattagagtaaatgcatctgacttttttttgtcaagtatctaatagcagttactctatgtgtagaaaaaatacattgtttctgtatattaaggcaaatattaaaggcttattaaaaggcctcgtcgggttgttttcagagtcaaaggactctgaaatgcttaatgcttaagaaacagctgatgggggtgggagaagtgtaaaatctttgggagatttggatactggtaatgccatgtggtgttggtaggttaattccagtgtttctttcaatgaaataggcactatggcatcagtaataaaaactgtgaagtagattgttgaaaattgacctgtttcctatttagtgacttgggaaaatggtaaattttgtggatgttgagaaacaataagtgttatactcttacttgaaaaacaacttttaaaaggaaacattatacagtatttatttaaatattttacttctccatagtcctggaagagtactcaagtctattaagttttgctttggagtaaaagactaaattttgagcccttgatcagtatatatattcatttctgctaatgataaattaattgaagaaagcattccatgttttattgtatggcaacacttttatgtgctataaattagtttctctcttctctaaataactaataatacatcttaatttttaattcccttttctttgcttatttctcctgattttcccttcagcccttgggagtctaaatttgtgctggtcagtctggtggccatgagccacatgtgattatttaaattaaaagtagttaaaattaaataaaattcaaaatttggtttctcatttgcactagccacatttcaaatgcttagtaaccacctgtsgctagtgactgctataattggcagcaccgattatggtgttttcccctcattgaagaaagttctgctggaaggcactgttctaaattgtcaggacaacttaaaaattctttgggcatatcttcctgtatctcagagtatgcatatatatttcacttaaattttcctcttctattatttcattttacttttctgtttttcagtttaaaaggatgcttaatcgggagctcacccatctctctgaaatgagtcggtctggaaatcaagtgtcagagtttatatcaaacacattcttaggtgagaataacaacatgcaattaaatttttttcttcagttgtttgcttgtttgtttttgtaggaggattggggtgccaactcattttggaaaccaaacaagtgttagaagttctatttgttttcattcgtcatattaataattcgacactatccgcctctgagttttagagttgcaggtgacaaggtacattttcttagttttatttaggactttaggaattcttgaattaagattatatattgccattttttcatagtaccaaactgtaaaatatattttatagagagatctattcatatcttcaacaaattcttattaaatgccagccattgttgggcaataggtgtttaatgataaattagaaatgattcctgccctcgatgaatttaccgtcttgtgtacatcaagcctagtaaactggtgggcagataaaatacaattgctaaataaaagtttgctaataatagctgagtttggtgtcctgggacaactcttgtacctcatccacagaaagaaaatgcagtaaataaaggtcagtaatttgaatgtatcctggacttactttcaaaacaaaattgctgttatatatagttaacatttattaaacactctagaatatgttctatatataaggatgagttagagttgctcatcactgccttgaaatcgtggatgaaagtaagaagatatcttaggtcttttactatagaacacaattagcttatgtacgtattcacttatcaggtaatatttatgattctctatgctcccataaaacctggggatttaacccttatctcactatcatacagaaataaaaagtagcagaattaatctaagtcatccaaaacctgctgtttcagctcccacagtgttacccatttcagttagctgttagttttatatactgctgttttcatgacatttgcgtataaagtttctaccatttcaaagtatgtattgaaactgtagtccttagttggcaagaacaatattcagttcattaagtyagtttcacaaaggaatggaattgaacagtggaaataaccacctgttgtgtattctgagtctgctgtcatgctaagtcttgcagcattttttattaggacattgtatcaaagaggtaaccatggaatacatttgatattattattttgtaatggaacttatttgcttaattttgtgtttgaagacatcaaattaagtccaattcaaatgtaaatactgaactctctaaaaggaaactttttagttggaaacatttcctggaatatataatgatcaattataatccttccaattatgcatatgatataaaacagatagaattaataataaatatagaacattttctaaatttctcaagataagcaacatgaagtggaaattccttctccaactcagaaggaaaaggagaaaaagaaaagaccaatgtctcagatcagtggagtcaagaaattgatgcacagctctagtctgactaattcaagtatcccaaggtttggagttaaaactgaacaagaagatgtccttgccaaggtatgatgatttcaaagatcaggatcataaatattaaatgatgccctttcatgaattttcacttctagtcttttaaatggatagaaaagtttattaattggggttttttttttttctttttttgaagatgggaaggcattttataaagctccttttaaagtgccttagacaggtggtttggtatgttttaggggtttggggggtgattatttgcatcttcatttcattgtttggccttaaagagttagaaatctgtcatgtcttctgggttttaggaaaacagttaaggttttgtgaatagattttatccattaaagaagtgctttgtgattgatacttaaaaagtacataaatgtgttgtaatgtcaaagtcacaaggttaagccatactgttcaattttcagtacatttaagtaaatgtgcctaaagtttgcctatgcttacatggtgtgtctgttaacatttaaaatgaatcattgtttaaaacaatctaacaatctttacactgaagtctgttttgttttgttttgttttgtttgttttgagacatagtctcgccctgtcacccaggttggattgcagaatgcagtggcgcgatcttggctcactacaacctctgcctcctgggttcaagcaattctcctgcctcagcctcccaagtagctgggattacaggcacacaccaccacacctgactaattttttttatttttagtggagatggggtttcaccatgttgggcaggctggtttcaaactcctgacctcaagtgatctgcccgcctcagcctcccaaagttctgggattacaggcttgagcctctatgcccggccacctaaggtctgtaatttttaaatgattgtgttcattgagtcatattttactccactttctaatattttagtatctttttttttttttcactccaggaactagaagatgtgaacaaatggggtcttcatgttttcagaatagcagagttgtctggtaaccggcccttgactgttatcatgcacaccatttttcaggtaaggtggttgagttstattacatttattttatttaggaacttaatgtccagtctgtagcttatgcatacattttgtcttttttaatattccccaccttttgcttatttttatacttttatccttatttgctcctttgccaagggacaagtaaagatacagaaaggtggagtgtggataaaccacaaataacatcaattttgttattttttttgcatttaagaaaaagatgtgatatagccaaattgaagcaatttattaaaataataatttagacatcatcttagtcatctgaacctgactgcatagagaatggagtactaacttaaaaaaaatgaataaagcccctgctggctactaaccttagaatatagttttttcagtcactttcttgtgtcctgcttctttcttcatatccatttctctctcttattgaccctttgctccagcttagggtgggatttaaatgagaagttgaggctgctgtagatatctcgggaccgaaatgggaaacttcagccctagagaggacgttgatttttagttggtgtgatgcaggggttgagttaatagtgcttgactggagctgcctccatgataatgggacatagaaacttttagagttggcacctcattcctgacaccatacagctagggcgtagtattcttgggttccagcaggacaacccaactctggttttgtcccagagtccctggatcttctcagaggttcccattttcctcactagacatgtgagagtgcagttgccatttccaggttatccactggcaacactggtgtgtgatttttttttttaaacatactctatggagaaatttttcacataaagacaaaaatgttaagatgattttttttcctacaggaacgggatttattaaaaacatttaaaattccagtagatactttaattacatatcttatgactctcgaagaccattaccatgctgatgtggcctatcacaacaatatccatgctgcagatgttgtccagtctactcatgtgctattatctacacctgctttggaggtaaatctgtttctgaaatttcaagaacactaacttgccactcataaaggtctattaaacttttatctgaagggttttcaatggagaagataattggattcattggaagtataacttattgacttatgggggaaaatgctatagttaatagacaatcaagtctttgatggattttgcttatgaaagttggtcacagatttagtgattgatctgtttatgatattgcttctttgaaatgatccactgaacatttcataaagcacatctggcttactcactttttgttcatttgttttcttgaaatctagtctgacggcttttatttataggccaaagaacgttttataaaacataagcaatatattgatattttttcatagaatatattagaaggacatactttaatttttctaaatcctaagaagttatttcattagttgtttactaaagcaatttgattttcttaagaaatatattttataattcagtttgttttcattataaaattatgttaatacctcatcatatgggtgagtgattctcaactggagatggtttctcttcccctttctttccctcctgccaccaccagggacatttggcaatgtctggaggcatttttggttgtcacaactatcacatttttagttgtacatgatactggcatcttgttggtagaggccaggaattctgctaaaaatcctacaatgcacaggacagcctcccacgcaaagagttattgggcccaaaatgtcaatagtgctgaagttgagaaaccctggtttcgatgaaagaaaataattgctaatgtcttactaattttatgtacattttcagaatattcttagacatcttaaatatttagaaaataaactattattttcttttaaaataatttcagagttttaaaataatattttaaaaaatacagtgaatggaaaacatttgatcatgagatgtaataaaattagataaaatattttcttccaagattatactttaaaagttcacaagtatctaagactctcccttgacacattgtaacacattttgaagcttcattttgttttccatttaaattctagagatttcttatttgtttatacttttaattcatatcattgtagaatagtaatattatctatattgtctgattttccaggctgtgtttacagatttggagattcttgcagcaatttttgccagtgcaatacatgatgtagatcatcctggtgtgtccaatcaatttctgatcaatacaagtaagtaaactttattttttcagaacacatttttcccttgtacattttagaatgactaagggtctttataaactcagagtcttccagagccataatgttcttttgagatgtgtatatatgtgttttagtgatagttcatgttaatgtaatttaactgaaaattatcattatatcccttgaggcatgtgatatttgaaaaatgtgttccagttctctttaaaagtaatatattgctgtgttactagacaagggtaattaaaaatgaaagtgtgcagaaagatttagaaagttgtattggccctaaagttttaaattaaaaaaaaagttatgagaattaatggtaagtgttcctcactttatgtaggtcatcatttaatcctcttcagaggccatagcttcccttcctcctccatgcccaacccctgttctttcctttttaaaatcttctaataagggtaacaggaacttcttaatattytttcaaccatttggttttttctcactgttaacatctcaccttataagaagtcatcactgaatttggaaatataaggaatagtagagactgtttaatatggagcatctctgacattgccgcacagaaagcctgtgtagggaatgtttaggtaatgcttgagctatcccttggtaaagagatttaggtttatagaaattctatttggtacttgaagttaattggtaagtgatttaagtgaactatgacttaattccctcccatatggtagattataaattatggtagattataaaatcataaattcacttttatatataaaaaatatgcaaagttgttgaaaatgttgtatgcttaagaatccacctttctttcatttttgcttgaggctatgaataatagtcttctcgtgcctatagcaatctagctatagaattatttatgaattcaccattcatttcctgtactttgctgtagccagatttaaagaaggaatgtagaggtaaccttgctttgagagatttaattcagagctttaggattatttacctatttttatatcttataatggcctctggactatcctatagcaaaatatactctaatgactcatccatgtagaggactggaaaagtcagggatttcctgagatgtgtggttagtcaagtatttttttacaagtttagtttaggaacttatttatccagattagacaggataacatttcatgttctacctacctatgagcacctataatgaggtacttttagaactcatcaaagcatacatacaaatattaatatacattggatgcagctccctgcatttacatggtatcagtggggaggtatcagtggggagggttcattatgtcctttctaagaagagcagggaggtcatgcaatacagtgcatgctggcactttacatgagcctggcctgatttattttgatgcttatgaatgtcttgagatattctgaattttatcaatttttagtaaatacataaaatgtatttttacataaaatttttgtgttaaaggtatatatatatatctatcttaaacaccaaacattcaaactggtatgttttctttgcattctgttatatagcatattatatgttcccttagaattaagagtagatttagaagacaaattaaaacaactgatagaaaggtcactgtcttccaagtactctgatacattttttaagggtaatgaggacctgctctattcttcattcttttgagcccttaaagcagcagtctccaatgtttttggcaccaggcaccaggttttatggaagacaatttttccataaactgggggcgcagggagagaatggttttgggatgaaactgttccatctcagatcatcaggcattagttagattctcataaggaacgcacaacctagatcccttgcatgagcagttcacagtagggttcacgctcctaggagaatctaatgtccctgctgatctgacaggaggcggagctcaggcagtactgatgcgggcttgcctgctgctcacctcctgctgtgcagcccagttcctgacaggccacggaccgatattggtccacagccgatggatggatcggggacccctgctttaaagggcacttgggctttgactggcacctggaggaccctggcatcagggtccctgtgcagtctgccatttaagctaacaaggcctcagtctacagatgaatctgatactctaaagtttgagaaccaatgaaatagtggaggaaactgaagaagataattttatctccttaggatgtctgtttaaagtcattttgctggtgacctgcctgggatggaaggataactaatcctgccgctgcaaattctttctttgttatttagtaatattgcaatgatctcctttctgtgtgaccacagcgacatagggaagttcacagttgccagagtagctttggattgctaaagtttttttgacgatgaggtgtgatgaggctgtgttattcctgagggaatgaatcagcattgtcactttgtacaggaaagtatcccagggttgttccgggccccagggcattatcaaaattacagccttagttagtttggtttggctagggatcatgtaagagaattatcttcccagcatgcagtaaaggaatccttctaataacttgtaaacttgtgatatgtagcttcgtgaaatattttatcaaaatttgtgcttatttttagtttgcagtaaaccttttttaaaatttgactttttatattttatggatggcttgagcatccatgtgtcaagccagcacattctcagctcttgcctcagagctggagctgccatcctgtccaaagcctgcagctgaatccatatttctcataataaagaattctaaagacctctgattatcaaatttataaacccatagttggttacttgtcttactttaaggaagctacggaagcactgagagcttaaggcacatggggggcgctggggattcccttggctggttcccagggcagttaatcctcctgcttcttacatgtgctcttcgtttttcttaattatttcagttgttttagctttaggtgccaaatgattttatactaattgtatttacactcgttgaaagcatgctggaggttctgcaagcagagagaacaattctacctggtagagttggttaagctataataaatgatttgagtgtgggtactgtgaacaggatttagagaaattgaaatttcaggcaggaagctgcgtaaatatttttaaaggatgatgcatataaataaatccataggccaggtgcagtggctcactcctataatcccagcactttgggaggtcaagatgggtgaatcactgacgtcaggagttcggagaccagcctggccaacaaggtgaaaccctgtctttacaaaaaaaaatacaaaaaaattagccaggtgtggtggcgcatgcctgtattcccagccactcaggtggctgaggcaggagaattgcttgaacctgggaggtagaggttgcagtgagccgagatcataccatcacactccagcctggacaagagtgaaactccatctcaaataaataaataaataaataaatccataaaatgtaaatagcagcatgaacttttgaatataaaatgctggagggtatatttaacttagctttattttctgaaaaaaagtatcaaaagtacagaatatagcattaaattttacttggcaaatgaattatttttgttaatagcaaagatgcctaagtttggggcagaaagatttattcacattagtgatgcattcaaagcatgcggtttttggtttccaagagcagaggcatttcattatattaaggttaagatgtatctagctgtcagtatacacttttttatttctctacttttattttgaaattaaaattttcatagctacactagtagattgtatgtagaattttatttttctgtataaacccacaccttcaaaataaggataaattcatgtttatcaaatgtgattatatagatatagctacagagattattttattcaacaamaatgtactgcaagcctactaaatgttataataaatattatttcaggcacttaggacacatggstggacaagacaagacaaatccctggctcttaagagctggcattctgctagaaaaggtggagcataataagtgaatttatggcatgtgatggtactaagtgctatggaggaaaataatgcagggtgagggcatagagagtggagtgatgaatgaggcagttttcttgacaactgaatattaagttaaaaccaccacttccctctgtcatttcatggagaaatgtttgtttctgaagtccttttgaagatttatgtttatttcagttgtaacttagagacatggtgtagcatgctgtcattttctaactaactcaaggctaagcctagtaaagctgtaagaacagtgagtgtaagtcttacttacaggatacatatctatagtgtctgccccagtcttaactgtttcagctccaggtcttaatattggctctgatctgccatgtggactccatcataagacacaaaaaggcacaatacctagtggacttagttggatttgggaggcaatgtattccttctttgtgtgtgttactctggcccatttactaagtgatctgaaaagctgctagtttagatggggcacagaacaagagagtgtcacaaaaactgctagttttgagtggggctctacaacaggtccagcctgctgtgcaagctgctctgcacatgggccacatgatccagcagatttaatggtgcttgaaatgtcagtggcagataggaatgttgtttggagcctttgacagagccctctgtgtgaatcacagcacagactctggagcaagaccctgccatcatccaaagaaagataactaactactctccttttgaaagaaagatataggcctgctgctgggccttaggagatactgactgactatgggccaccaagtttccatgtggtttaagctgtctgcccatcattaatagggtattatctaacgcgccaagccatatgttgggcatgtacgacatttcatcatcaaataaaagtagtgtaatacacgatctatcaggtccgagcagacactaaaggcacaaattacataaagaagtggccctaatgccactcctattaattacactgccttctttctcccagcctacacatgtggtcgcatggaaagttccctgcaagtagttgacagagggcctggtttacggatggttctgcgtgatacgcaggtaccaccggaagtatacagctgcagcactactgcccctctctgggacatctctgaaggatggtggtgaaggggagtctttccagtgggaagaactttaggcaaggtgactcgttgttcactttgcttggaagagggaatggccatatgtgcaattatataccagttcatgggccgtagccaatgatttgtctggatagtgagggacttagaaggaatatgattggaaaactggtgagaaagaaatttggggaagagatatgtgaatgatctctctgaatggacaaaaaaggaatgctcaccaaagtgtgaccttggcagaggaggattttaataaccaagtgaataggatgacccattctgtagatactagtcaacttggttccctagccacccctgtcatcacccaacatgctaagaacaaagtggccatggtggcagggatggaggtggcaggatgtgcttagaaacatggacttccactcaccaaggctgacctggctatgactattgctaagtgcgcaatccaccagcagcataaaccaacactgaacccccatataacaccattttggggggatcagccagctacctgatggctggttgattacattggaccacttccatggtggaaagggtagcattttgtccttagtggaaaaggcactttctctggaaacagatgtgccttccctgcagtttttctgccaaaactatggtattccatacagcattgcctctaaccaggaactcaccttactggcaaagaagagctgcactgggctcatgcccatggaagtccctagtcttaccatattccctaacatcctgaatcagctggcttgataaattggtagaatggccttttgaagactcagttactcagctaggaggcaagaccttgcagggctggggcaaggttctccagaaggccataaaggccatatatgctctgaatcagcatccaatatgtggtgctatttctcgcataaccagaattcatgggtccaggaatcattggatagaaatgggactgttacgactcataattacccccagtgacccactagcaaagtttgcttcctgttcctgcaaatttatgtgctgctagctagaggtcttagtttcagaaggaggaatgcttctatcaggagacacaacagtgattccgttgaactggaagttaagacctagccactttgagctccttatgcatctgattcaatcatccaagaagggcattacagtgttgactggggtgactgatcctgactaccaaggggaaattgggttactactccacaatgaaggtaaggaagagtatgtgtggaataaggagatcccttagggcatcccttagtattaaccatgccctgtaattaaggtcagcacaaaataacccaatccaggcaggaccactaataacccatacccttcacgaatgaaggtttcggtcaccccaccaggtaaagaatcatgaccagctgaggtgcttgctgagggaaaagggaatacagaatgagtagtaaaagaaggtaattacaaataccagctatgaccatatgaccagttatagaaataaggactataattgtcatgagtattttcttatgaatgcatttatatgtatatatacatatattaagcatatatcttcattttctttttcttattcccttatataacataagaggtattaacttatcttcattttctttttcttattcccttatataacataagaggtattaactttatattagtatttaagtatttattttatatcatagtatttaagttataggctatcaggataagagtaaacattactcaaaaactttactttcacttctggggaatgtgttagtgtgcttttagttgtatgcaggatagttgtagcctgtttggtagaattatggccttatggagattaaatatggttaaaggagatgcttatgggtaccagggtgacaaggggcagaatttgtaatggttaattttatgtgtcagcttgactaggctaagggatgcccagatagctggtaaaacactattttggggtgcgtctgtgagagtgttcctggaagagattagattagcatttgaattggtagactgattaaagaagattgcccttaccattgttggcagggatcagtcaatccattgaggacctcaaagagaagaacaaaaacattgggggaaggggcaaattttgctttcttcggagcctggacatacatattctcctgcctctaacatcagggttcctggttgattctctggcctttggacttgctttcctggttcacctttgcagacatgggacttcttggactccataattgcctgagccaattcctataataaataaatgtgtctttttctcacatacacacacacactcatacatatgtctattctatttctctggagaaccatgattaatacagagagagaaaagattagcacagatgaagtacatgttctcagttatgtggtagtacctgcccacccttccccccatttcattagcactcagaagagagggacacaaaagtggtcttcctgccttcagtagtagcatatgttgggcataatttaatttattcttgatgatccagggtagttgtaacaaatgagcacaattgatctatatataataaaatgatggctttgagtttgtaaaggtatgcatggcctctcaataaaaaataaatacttacaaagttgtctttataaatgtgtgccaggcactgagtggactgtgttgatttcctggttcatgtttagtgttcactgctcaggttttcacctctataaggtacttgtaatcatagtcagtataaggtgagggctctagaaactgcctggttttaagtgctggccccagcacttactggctaggtgatgttggcaaagttacctaccttctctgaggtacattttcttcatttgtacaggattatatgagtatgtctatgtaaatatttatgtgtataaaagatgtccccaagggacattttctatcccccagcctatcccaaggacacaaagacttacttcccacctatatggctccatgccatccatgaatggaacatagccttaaaatgtcgataacaacagtatcttcctaaaagagttatgaggattaaatgagatgattcacataaaccatttaacacaatggcacctaaatcctctaaatgttgtgccttgctgtattcctgtttgtactttgtaagtttgaaataattgaagtgcctaggggaagccagataaccaaacatattaaattaataacctttaatattttgtaggggcttaagtctctaagtaggttgggagggtttggggaggaacgattaaaagatttgtagagataaagacaaaaaaggtagaatgcgatacatgctaaatgggtggtacaaagtagtatagaagtttacaggagaaagtgggcagtttcatctggtaattaagaaagacttgatggaagaggtaacttatattgggcttgaagatgaaagggtttcaacaaaaatgttatataagctaacctctttgcccctctgtgctgtgcactgtaccatcctgacagcaactttctgatcattcctgaaccttcaaggactctacttacaagtaatggattagtgtctttgatgaaaatctgctgaggagctgcagactcctacctcccaatttaaatgtgaccatatgccttcagtcctaaagaagagtagaaagttaaataacttccttgagattcagtttcttaaatgctaacatttgttcatttaaaaatcaacagtcaccaccactttcctgtaacagcatctgagatggaagaggctatggaggcctgccagtccactaaggcatcctttcctggcttttctagccaatctggactctttaagtgtcaggagataaccactctccaagacaggccttgccagtattcttggacatctgccctacatgaaaggccctacttatatccagtagaactcagactctttgttgcaccttccatacaacagatcacccttttccttgaaggaagagctcatcatcttattcttttgcagggtcaacagccttaatttccttcaccttcagcttcatataagccaattagggtttttgtaaggctaagtcaattctgttaacactgcttgtctacatgcatatttccttccttaaacgaactctaataattatccagtatctaataattatgccttcctttcaatatatgtttgtttatttgattccactgtagaaatacaataatatgtgctaagaacctatatagttttaaatttttcatttctatatgcttacctatctgtagataaaggttcataaaggcatttatagacactataaaagttcaccagaaactgccttttaaaagataaacactattgttttatctaaagaaaacaaaaaataacaaaaaaatactgtacaaacctactccctactagtctaaacagctctgctcctgtagtttgggagcagaaatttaagtgtgcaaatttgtatttctatagttccgataaaataatagaatttctcagttgaaaatgtcttaagcctctcctctccttcctagctccattaaaatagccattgaatagtattgggtatttctttcttaaaaaaagatatatatttccaaatatattttctatgcattcgttatatattttctatgcattcgttagaaaaaagatcaaatacctgtgcttttaacctttttcttttcttttcttttctttttgaaacagagtcttgctctgttgcctagtttggagtgcagtggcacgatataatggctcactgcagccttgaactcctgggctcaagcaatcctcctacctcagcatcccaagtagctgggactacaggcacgccctaccatccccagataattttttattatttgtcgagatgaggtctccctatgttgaccaggctggtcttgaactcctgggcttaagcaatcctcctgcctcggatttgcttttagtctttacagtgattaagtggaaagagaataaagcatcaaaagttttttaatgattatcttgtagctctgggtctgctatttacaagaagtaggagagaggcagaatctctccctgcctaaaattcacaggtctagggcagtagggagagagtggcagaatcttcaccagagggtatacagacagccaaacacaacatcactgtgaagctgtgagcaagcaggcaggaagagcaatatccctgtacagtatacaatgactgccacgatacttggaaaagaaaatggaaaacaatgaataaagcttggactttcagagctatacatgagcaaatgagcaaatctaaacttgttcatatgattccttattgttcttgtaccctctttgagtacaaacaatcctgtaacacaggatcctcactttatatagtgcagggtaggtaattcacagttatcaggaatacaaaaccttatgctctggatgtgttatagatactaagaataatgtcatattctgctgagctcatggcaactctagaggagaggttaaagatccaattctttcactttagagaaagctgagacctacagagtgaaatgacctgccacatgttagtagcattagaattcactccccaagattcattccagtgttgttcctgctcttatgttatctgatttattctctcctggatattgtcaggtaatgataagggcagcagagaagtttaggggaaattacatcctaaatccagaattttaagaatcagataaacttctcacaaacagttttgctgatctttggccttttgtcttttttacagactctgaacttgccttgatgtacaatgattcctcagtcttagagaaccatcatttggctgtgggctttaaattgcttcaggaagaaaactgtgacattttccagaatttgaccaaaaaacaaagacaatctttaaggaaaatggtcattgacatcgtaagtagctgataaaagccaaagaagagaactgtgatgcaagttgtttataatttagacataagaacaagatgagtattaggtaaaaggaactgcatttcaaaacatattatggccctttatgttatagaagctgcccgtgatgctggctgtgatgttctgtaataggtttttcacttctagcagtttggacttgagaataatgtcagctcaccctcatcatttattttctgggcccctccagtctggtggcgggcagagaaaaatgactaacaaaagcagattgtgtgggccacagctcaaatggattttttccccaccttttctcatcagtagacagtgccatttagacatccatgactttactcttttttctatgcatcttattcagtgattatgagacacaggaaaatctctagctttcaaaaacttataaacttgtgatgatgtcttatccatggagatgtcacccatttttcaccatgaaagtggttgtcagtgcctagcatttctgtatattacacacatttatctgggctttgggaaaacttgatagcaaaggggaaaagactctgcccccaaggagtagtaaggattttccactgtcattaaaaggcatagtgttgttttattcctttttcattcttatattctgcgtaatattttcatgtgtaaattctgttttctctgaacttaataatatactctatattttaaggtacttgcaacagatatgtcaaaacacatgaatctactggctgatttgaagactatggttgaaactaagaaagtgacaagctctggagttcttcttcttgataattattccgataggattcaggtaaagccttgtttgagtttgctctgtgtgtgtgtgtctgtgcacatgtgcacatgtctgcgtgttcagctttgataagatgtatttcttccttctcccaccttatactttcagcaattgtaggcaggatttttatccaaatttttattcctgagaattaaccaggtaaaattctactggtctttctgtttgcatctacattaattaaaaaaactaacaaacaaacaccccacagaaccagccacttaagcagctctgaatctagtcagccatgcacataaacagtttctcttaagctatttagatgcagtagaagtggcataatttggaactattaatacaagtgtgaactatacacagacacatcatggttgagctgtttggaataaatcttacactacgtgtatttttaagtgtygcagtcatccaatgtgaatttctagttttttttgtttttttttttaaaaaaaaggaacaggagtgaatagagaatgcatccatctattttaggttcttcagaatatggtgcactgtgcagatctgagcaacccaacaaagcctctccagctgtaccgccagtggacggaccggataatggaggagttcttccgccaaggagaccgagagagggaacgtggcatggagataagccccatgtgtgacaagcacaatgcttccgtggaaaaatcacaggtaatgcatgaagtgtatagctttcagagagaacagagctaccgctttagcatttggttactttgtattacatatgatagtattttactggatttttaaaattactttgtttttgacaagctcaatttcaccttagtatttatgatccaaagaactttcattcttatgacttacattcatatagtcatatatatattctaaagacatattcatttattatgactatattcatttaatatattcatatacatagagcacatggcattatttcagttatctggattcacctacaaattggtgattgtaaaataagccctaccatgtcaacaactggaaaattttttatgctatagaacatgctctttaaccaaaggttctagaagctaattttgaccagctagtagcaatactttactttaaatggtctgttgttgttgaaaatagtgacaattttaccaaactaagtttagtagtcttctgttcagtgttttatttgtgggccatgatctaattaagcttttccattgtttcttagtcccaagtcctctactcatactggatttttttcttaactaggtgggcttcatagactatattgttcatcccctctgggagacatgggcagacctcgtccaccctgacgcccaggatattttggacactttggaggacaatcgtgaatggtaccagagcacaatccctcagagcccctctcctgcacctgatgacccagaggagggccggcagggtcaaactgagaaattccagtttgaactaactttagaggaagatggtgagtcagacacggaaaaggacagtggcagtcaagtggaagaagacactagctgcagtgactccaagactctttgtactcaagactcagagtctactgaaattccccttgatgaacaggttgaagaggaggcagtaggggaagaagaggaaagccagcctgaagcctgtgtcatagatgatcgttctcctgacacgtaacagtgcaaaaactttcatgccttttttttttttaagtagaaaaattgtttccaaagtgcatgtcacatgccacaaccacggtcacacctcactgtcatctgccaggacgtttgttgaacaaaactgaccttgactactcagtccagcgctcaggaatatcgtaaccagttttttcacctccatgtcatccgagcaaggtggacatcttcacgaacagcgtttttaacaagatttcagcttggtagagctgacaaagcagataaaatctactccaaattattttcaagagagtgtgactcatcaggcagcccaaaagtttattggacttggggtttctattcctttttatttgtttgcaatattttcagaagaaaggcattgcacagagtgaacttaatggacgaagcaacaaatatgtcaagaacaggacatagcacgaatctgttaccagtaggaggaggatgagccacagaaattgcataattttctaatttcaagtcttcctgatacatgactgaatagtgtggttcagtgagctgcactgacctctacattttgtatgatatgtaaaacagattttttgtagagcttacttttattattaaatgtattgaggtattatatttaaaaaaaactatgttcagaacttcatctgccactggttatttttttctaaggagtaacttgcaagttttcagtacaaatctgtgctacactggataaaaatctaatttatgaattttacttgcaccttatagttcatagcaattaactgatttgtagtgattcattgtttgttttatataccaatgacttccatattttaaaagagaaaaacaactttatgttgcaggaaaccctttttgtaagtctttattatttactttgcattttgtttcactctttccagataagcagagttgctcttcaccagtgtttttcttcatgtgcaaagtgactatttgttctataatacttttatgtgtgttatatcaaatgtgtcttaagcttcatgcaaactcagtcatcagttcgtgttgtctgaagcaagtgggagatatataaatacccagtagctaaaatggtcagtcttttttagatgttttcctacttagtatctcctaataacgttttgctgtgtcactagatgttcatttcacaagtgcatgtctttctaataatccacacatttcatgctctaataatccacacatttcatgctcatttttattgtttttacagccagttatagtaagaaaaaggtttttccccttgtgctgctttataatttagcgtgtgtctgaaccttatccatgtttgctagatgaggtcttgtcaaatatatcactaccattgtcaccggtgaaaagaaacaggtagttaagttagggttaacattcatttcaaccacgaggttgtatatcatgactagcttttactcttggtttacagagaaaagttaaacagccaactaggcagtttttaagaatattaacaatatattaacaaacaccaatacaactaatcctatttggttttaatgatttcaccatgggattaagaactatatcaggaacatccctgagaaacggttttaagtgtagcaactactcttccttaatggacagccacataacgtgtaggaagtcctttatcacttatcctcgatccataagcatatcttgcagaggggaactacttctttaaacacatggagggaaagaagatgatgccactggcaccagagggttagtactgtgatgcatcctaaartatttattatattggtaaaaattctggttaaataaaaaattagagatcactcttggctgatttcagcaccaggaactgtattacagttttagagattaattcctagtgtttacctgattatagcagttggcatcatggggcatttaattctgactttatccccacgtcagccttaataaagtcttctttaccttctctatgaagactttaaagcccaaataatcatttttcacattgatattcaagaattgagatagatagaagccaaagtgggtatctgacaagtggaaaatcaaacgtttaagaagaattacaactctgaaaagcatttatatgtggaacttctcaaggagcctcctggggactggaaagtaagtcatcagccaggcaaatgactcatgctgaagagagtccccatttcagtcccctgagatctagctgatgcttagatcctttgaaataaaaattatgtctttataactctgatcttttacataaagcagaagaggaatcaactagttaattgcaaggtttctactctgtttcctctgtaaagatcagatggtaatctttcaaataagaaaaaaataaagacgtatgtttgaccaagtagtttcacaagaatatttgggaacttgtttcttttaattttatttgtccctgagtgaagtctagaaagaaaggtaaagagtctagagtttattcctctttccaaaacattctcattcctctcctccctacacttagtatttcccccacagagtgcctagaatcttaataatgaataaaataaaaagcagcaatatgtcattaacaaatccagacctgaaagggtaaagggtttataactgcactaataaagagaggctctttttttttcttccagtttgttggtttttaatggtaccgtgttgtaaagatacccactaatggacaatcaaattgcagaaaaggctcaatatccaagagacagggactaatgcactgtacaatctgcttatccttgcccttctctcttgccaaagtgtgcttcagaaatatatactgctttaaaaaagaataaaagaatatccttttacaagtggctttacatttcctaaaatgccataagaaaatgcaatatctgggtactgtatggggaaaaaaatgtccaagtttgtgtaaaaccagtgcatttcagcttgcaagttactgaacacaataatgctgttttaattttgttttatatcagttaaaattcacaataatgtagatagaacaaattacagacaaggaaagaaaaaacttgaatgaaatggattttacagaaagctttatgataatttttgaatgcattatttattttttgtgccatgcattttttttctcaccaaatgaccttacctgtaatacagtcttgtttgtctgtttacaaccatgtatttattgcaatgtacatactgtaatgttaattgtaaattatctgttcttattaaaacatcatcccatgatgggatggtgttgatatatttggaaactcttggtgagagaatgaatggtgtgtatacatactctgtacatttttcttttctcctgtaatatagtcttgtcaccttagagcttgtttatggaagattcaagaaaactataaaatacttaaagatatataaatttaaaaaaacatagctgcaggtctttggtcccagggctgtgccttaactttaaccaatattttcttctgttttgctgcatttgaaaggtaacagtggagctagggctgggcattttacatccaggcttttaattgattagaattctgccaataggtggattttacaaaaccacagacaacctctgaaagattctgagacccttttgagacagaagctcttaagtacttcttgccagggagcagcactgcatgtgtgatggttgtttgccatctgttgatcaggaactacttcagctacttgcatttgattatttccttttttttttttttttaactcggaaacacaactggggaaatatattctttcccagtgattataaacaatctttttcttttttttaagtccttttggcttctagagctcataggaaaatggacttgatttgaaattggagccagagtttactcgtgttggttatctattcatcagcttcctgacatgttaagagaatacattaaagagaaaatactgttttttaatcctaaaatttttcttccactaagataaaccaaatgtccttacatatatgtaaacccatctatttaaacgcaaaggtgggttgatgtcagtttacatagcagaaagcattcactatcctctaagatttgtttctgcaaaactttcattgctttagaattttaaaatttcaccttgtacaatggccagcccctaaagcaggaaacatttataatggattatatggaaacatcctcccagtacttgcccagcccttgaatcatgtggcttttcagtgaaaggaaagattctttttctaggaaaaatgagcctattttattttattttattttattttttgacacaaactgtagattttagcagccctggcccaaaggaatttgattacttttgttttaaacagtacaaaggggacactataattacaaaaacatccttaactgatttgagttgtttttatttctttggatatattttcagagtggtaaattgtgtgtgagaattacaaatgattattcttttagtggtttcttagcctctcttacagcccacggggatagtactgtacatcaataccttcatatgaaatttttatatgcaatgaaaataaaagcatgggttgattctgcctatttatgactcaatcttttacaaataaaagattattcattttaaattatagttcaatcagcatgtctcttaggatactgaacgtggttgaaatgaaaggatagtgacatcataagttagtactgatattcataaccaaataaagccaacttgagtaattttgctacattaaaaattaccaaaattacttagatggcctataagattaagcatggtgttttctaagcaagctttgaaaggggccttccatacttacttaattgaatattctgggatattgaaaattattcagatacttgacaattatttttggttacctactccgcaaactacaaagttttaaggactcaacaataagttaatgagacacagtgtttgctttcatggagcttacagtctggaggggacaaaggcttaaacaatactcatataattatatatgtgatcagtacaatgaaggagctcagtggggtaaataagcaggaacctgaacttgatctgttccggagggccacagaaggcttccttgaggcyttgagaaagtgatttgcatctgagttctgaaggattgtaagaggtaactagggaaaaagttgacaggaagaggaaggggatccagacaagaaacatttgcaaagatcttgaggcataaatgagcttgagacatctggagaaactgaggaaaagtgagagagtaggcagggcctggagccgcagagccattgctaaccatcctgtgtgagatatcccccattctgtagctttattctcataaccctgctcaattttctttataacacttctcacagatttatatacgtgtttgtttttgttatctgtctctcccaccagaccacagctccatgagagcaaggtctttgcttaccaatatatcactagcacttaaaactatgcctggtacacagtaggttcttaatatgtgttgaatatagccatcaaattgatattggatataattcaatctgataagatattttgagatattaaagagtttttaacttgataccataaaaactttgtttgttttttgtttttgagcttactaagatcctggataaagagtttagagtttcctatctctttgctaactaaaaactctgtttgcttattcctcacaaattctacttttttctaaatgacaatccatttgtcatgataatgagagtaaagaaatcagcacaaatttaatccccagatcatccccagaccatgccagcagaataagggtaattaaacagagcatctatgcttagcctctccaccatttctcctgccacaacagtcctgacagccaacaggtgccaaatttgtgccttcctgggaataactgttttaaactcaagctcccttccccaaagccatgaccccaaagtgacactatggaactaaggaagcaactcccttcttttcctgacttgccacgcttgctgatttaggctaatttgggtggtggtgggcctgaactcacattaaaatctctgacctggaaacctttcctcaggcacacggctttggacccacaacagcaacattccaccaaaaaacaaaccaaaaccaaaaacattccctgttgctagagagtaccacctgtctaccaaggggaaaacaaccttgtgtcaggggaatcataccagggctttcccatccttctgatttgggtcctgcatcccacccagctactccgagagctccaaatactctaggtcaaactcagtgctatgggtataaatcttgaatttgtacacataggaaatactactttatttcctttaaatcaattaatctggactcggggctccagccaatcacactattggaaattcccatctctcattactgccacagctcctctctctcccaacataaaatttatcttatctccaatataatctgagtatcaggcctctgtgttgttccagcagaggttccttacagtccctcagctattagcttcctggtcacatgtggtgtaccaggaatatatgctggtttggggccctgcttccacacagtgtgtgcatcaaaagagcctatccttctggtgttttattacaccttgctgtggtctgaatgtctgtgttgaaatgctaacccctaggtgatgctattaggagatgggggccctttgggagataattaggttatgaaggcagagtcctcatgaatgggatcagcgcccttataaaagaggcccaagggaccttgttcaacctggccaccatgtgaggactcagctagaaggtgccatctgtgaaaatgaaagcaggtcctcaccaggcaccaaatctgccagaaccttgatgttggacttcccagcctctagactgtgagaagtaagtgtgttgtttataagccacccactttatggtattttcttatagaagtctaaggagactaagacatacctactgaaattactacaaaaaaaagcagttctcttcttttcctaattctcaacatattctccttcttctctctccttccttcttttgctctccaatgagatcaggcttaaaaccaaaaacgaaacagactagaggtagttctgacttccatttgcttctgctctccactctgcaaaaaccctggctattatttgaaatatggagacgaaaaaagatattggaagagcatacattaaataatagtccattaaccttccacacatggttggcaacatctagatccaacaatgttcactgaacattttgagatgtgggaagttgaggaagttgtctccaagaggaagtcatcaggaactcccatacttcctatgtgggaacacagggaaagaggcattttttcctgaagtctctgtgttccagtgctatccctgaatgtctattcccagctctcgcttagctgtttcaatgacaagatatagcacttgaaaattttataaagtgagagtcatatttgctccctgctgcaagcccccaccctgccattccaggaccctgctatggtccacaattggcattatgattccctctattttgcagctatgaaaagtgaggcccaagaaggttaattgacttggctaagattattcacaggctaaatactgagattaatgatttgcaaactacagatttgacagaagtcctaatgctatctctacatcctatttctgttgaggaccaaaattgactgttgcattgcctttgatttcctttgaccatccttcattacagatttcagtaatttttatggtccaaagctaggtgacagatattacatcatatgcatttgttaactcaccctatgtctgcatagccttgctatatggtcagaattctccagattgactggggaacttggagttaaagagcccctgaccccctaaaaaattatagaaaatgaaagaagctgtcaagaaagtaaggagcagagataagagcagagatgggagygtgcctctgcccggcagagactcacaacatgaggcaagacagatcttagctgaacttcttgcaggatgtatgcctcaatgaaaggaatggagcacgggcagcatccggcttaggctggagccccttcaaccatcatggctgttttagcagggtgtttgccagctgcttacaaatcccaagccaacagacatggtttcaggacctgaatcatgcaaacatattttctgaaaggttctatcacctgagaattgcttttccttcgctccttgtttttgaaccaaaaagccgaccaaatgtatagtggcaaacacttgctcagcacccatccatgcaaggcactgttttaccaccaggctgcatcagttagagaaccaagccgtctctcaccttgcagcttcttcacactttgctcattttctctctaacactgatggtttctgtttcctgctattcagttacagcatctgggaagagagtggcagagaacgccaggcaactgcaccctgccacagtgggtcaagcggaggctgggtggtgacacccgtctctacccagcagaagtcagtggttcatgggtggagaacaaagctcaggacagctgctgcagtccagggaactgtccaccatagaagactcttgggaagcagcccctgaccccaaccccctgtgctttttgaagccgtgtctggtatcacatggaattatgcagtagtcatagaatatctttgaaaacttatattctaaaaataattgctgagatcagcgattaaaatatctaataaatggactggaaaagttgaaaacaagcaaaggtgagagaaaacaattgaggaaaactgggagaaagtgaaggaagttggaccctttgtactacagcatccaaggacagtgatgatatcttctgttccccacaggacccaggttcctgggtgcttaacgtaacacataaggcccttaaggatctaatcaaactaaatcatccccaactcctcccatcaaccccacatagatatccctgtgcctcagctaaatgctgcctttacaccttgcctttacatctctctgcctggaaaacagctcatccctcttgatccagtttaaatacacctttgtctggaaagcctttcccattagtattttatacacaaccctataataaatatttcccctaatatgttgtattttttaaaaaaattctttctctcactagattgtgagatttttaatttttatttttttagacagtctcactctgtcacctaggctgaaatacagtggcgcaatgttggctcactgcaatctctgcctcctgagttcaagtgattctcctgcctcagcctcctgagtagctgggattacaggcatgcatcaccacgtccagctaatttttgtaattttttagtagagatggggtttcgctatgttggccaggctggtctcgaatcctgacctcaggtgatccgcccaccttggcctaccaaagtgctaggattacaggcgtgagcsaccacgcctggcctagatagtgcaatttttaaacatcaatgtattcctttttgcctgctagtaaggaattaagtccggatattaacatttgactattctttcccctctaacaccaactcttctcaaaatgtggtccttgagctgacattaacgtcaactaggatcttgttagattataatctagccccagaccaaggctccaggaaaagactctctaggggtggaccctagaacctgtgttttaacaaggactccaggtgataagtatgctccataaagtttgagaaacactgttcaagacatcatggaggtgtttttctatttctgttttttttaagaagcaagttaataatctcaaccacctttctaatgtatttcatttaatcaaagggatacttgttgctacaggagttacaacagatgacctagtgagggccacaggcagtctgaggaacagtaggatcccatgtttggccaatgtctatcaagcaagaaaggaatagtgaagccagctattagctcccttcagcagaggaaacctgggattaggagtcgccatcaggcatcatggcatcacaagcaggcatgggttraagatttaaatgttgcaaaaagagagaagaaccagaaggaaattacgtccacattatccctgcaagaccattaatgtaatgaacagaaatcaaacaccttttcagtcttcaagtgccgcattcaggttcactctgctaatcacacagctgagtggccctctgctttcataactgggtgaaaccacacatcccaccccaagatggcttgggatctaccatcacaaggggccaccaaagggccaaataacacaaccccgaaattcagtggtggtaactctccatggggttaactttgattactgggaaactagaaatgggaaggagccagtaaattaatttcttctctcccaagactattctgaggcatagcctcccccttgaagcccatcaggatgatcctgcagttccatgtcagcaagagcgccctaccaagtgacctgcagtgtctcttggctgctccttgtgagtcagtagccagcagagaaatgttttccctactttcctttatttctttgttcttacttgcttcattttgccttgacctttttttcctcacccctactacccaaaggcatgtacttcccaaataaagtctgtcactctgatccctccctcagactgtttccagggatgctgagcaccctgtacattcagaaaagcagatgtcaaatttctgtatatatattggagtgcactaagtatttaaaatcaacctttggctattagaggtagggactgtgccttatgcatcattgtttttccagggcttagttcagtgtctgccatatagcaagtattcatttaacaggaaaagagaaagacaagtgggtaagtaattgcctgaatgaatgaggttgatggtgaagaatgggtgggaagggcatgaattggcctagaatagattagacattaagtaagcaggagtcgagacagttaaggggccaaaggcagctgaaaagaatatggaacaggaatacaagttgaaggaatcaggcattctccctagaaacaaagggtacgggaagggtaagagacagacacttcactgtctgggaattttcatccatactcgttattaaagacacacttggttgcctacttaattattaccaaccctccacccccactttattcctggcatacataagtgggattttgttcaggtcgtgtgaagtcaagtcttccagggagatccagcctctcctcagttctgtaggctaattctgagccttttatggtaattcctctacccttgccagtgattaggttaggacaggcttgccgtgctgcaatagtagacagtgagacacaggttgacttctgggaaaatatccccaactcttacaaagaaaagagagaacagaacattttttcttcggggctttggaaattattttcaaagatgtcatggttaggctattatcttgaggccacgaaaggaactatctgaatacacagacaacatactgaaaatggcaaagcagaagttagatagcacatgagtctttgaagatgtgtttgagctgctgaactaatcagccctactttgaaacttattaagataataactagttattatttaagccattttagttgaacctgctattatttgcccctgaaacaatcctaactaatatactgttagtccatttgtatcgttataaaggaatacctgatgctgggtaatttataaagaaaggaggtttatttggctcagagttcttcaggctgtacaggaagcatgcacggctctacagctgcctggcttctggtgaggcctcaggaagctttaactcatggcagaaacaaggggagctggcgtatcacatagtgggaggaggtggcaagtaggcagggaggaggtgccatgctgttaaacaaccagctccttcatgaatagagtgaaaacttatacattactgcaaggacagcaccaagtggatcatgaaggatcgtgacccaaacacttcccaataggccccaccttgaatattgggggatcaatttcaacatgagacttggagaatacaaatatccaaactatatcatacacccactctttgttccaacaatgtgctggtgagtctgggctgggartgggggagaaaggtacctggcacagtggaaatgttggaaatttgaccccaaattagctgggtgaccttaggcatgttaattcatctctactttctttcattttaaataggggaattataatattggaatcttctctacattcttcacagtattagagcaaatgaatttataaatgtaaactcagtgtaaactttagataaaatttttcaaacactaagcttgtgacccagagtagataataaagtcaaaagatggttgccatgagcactaaccgtgaattaaaatagaatagagaatatcactgtgtgctgcacataagtttcattttctgaaattgcttcatttacatgcatgcatgggtgcacttgtgtgcttgcacacacatgcaaatgttgccaagtaaactatttttaaaagcatacgaagcatggatttagaacaaagtcaacaccagagacaactagaggaacctaagtctctcaccaacccccacccctgccaatttacctgtcatccatgattcaaaaatggtttctaaagggaaataaaaattgattcaaaagggagacctaatgagtaacataatagggagccattgattgttttagagtggtatgacggagcagtgggtaagtagatcactcaacactggtatttcagactgccaagagaggagaaaacagacacaaagtgatttctgggcttttgacaactttttttttctcaaagtagattgacaatattatgtgtcatcttatatatattaatagacaaaggcaatatctacacttgggaatacttcatggaaggcttggctggaaactaaaaactggactataaacttcttgggggttagatacgtatcttaagacttccttgtgtcttgaattgtgcctagcctagtgctgcatagatatgtaagccactcattcttgtgcaattacctattgtagaattttcagactaatatatttccttttccttgttttgatcctctgctgaatcatgagaatagttctcaggtgaacagcagtgatgtacagtgtctcactggaaaagcaggaaaataatcagatgtaccccagaaccttaggatatgggaggctcttctactggccactccatgggaaactcgcttgctttgggggacagtttgctttgctctattttgtgggcacagggttttgccttatttttctactcccttattcccagcaaacatcctaaaaagatgtgggtaaaagaaaaagagaataaattttgcaattctactcactggctagaaacagacagagacacatgagtagaggcggagtttaccatcacccttaatcatcctggggcccatgtgtgtataaaaggcaagaaaagagccattaccaggaggcactcaccttcacagtttccaccgcataattccacccctctgtatcaaactacccaaattgctacaccaatcacaactgccctcttgttcaaagaaaataatatcatggatttctttcctggcagttctgctattgattgtttttgttcttttaataagcaaggtgagaaggttagaaaaaaattattcagataattcacctgggagtagggtaggaacttgaggcatgcagagagaatggcaaattcaaaatcaactaagccataactgcctatcctactgaccactgtgccaggtacctcaaaagagtaggacttgattcttccttttgaggaggtttcagtttggttggaaaggaatgggggaggggccaagtacagtggctcacacctgtaatagcagcactttgggaggccgaggtgggtgaattgcttgagcccaggcatttgaaaccagcctgggcaacatggcaagaccccacatctacaaaaaatacaaaaattagctaagcatgatggtgtgcacctgtagtcccagctactcgggaggatgaggtgggagaatcacttgagcccaggaggttgaggctacagtgagctgtgaacatgcttctgtgctccagtctggactacagagcaagactctgcctcagataataaaaaaataaaaaaggaaaaaaaaaaaagaaatggggaatggaagaggaaggaatccaggggaagaatgatcactaagactgcatcacaccttttgctatctcatttcaactctacatcaacccaatattcccttcatttaacagagaggtcaaaagaggctggaaggataaggttgtccagtaaaaatgtcaaggctgatatgggaacatagccagtttgtctctaaagtgccctgtgtcccttggggaagagaatatttaacttgattgttgcttcagttttttattctatgtcagctatcagtttgcaaggcattatttaggggatttcctttactttctttttttttaaatctcaaatttccctctcatttagtaactgtaatttcagtgcctaacatgtaggacaaaatactttccatatttttttttcaaaatttttgcactgactgtagtcccctcactggaacagctttatttccctaaataatatacaatgaacttgttcatatcgaagacgtatgccaatattaaatacaaacagctcagctgggcgtggtggctcatgcctgtaatcccagcactttgggagactgaggcaggtggatcacctgaggtcaggagttcaagaccagcctggctaacatggagaaaccctgtctctaataaaaatacaaaaattacccaggtgtggtggcacatgcctgtaatcccagctactcaggaggctgaggcaggagaatcacttgaacccaggaggtggaggctgcagtgatccgagattgtgccactgcactccagcctgggtgacagagcaagactctatctcaaaaaaaaaaaaaaaaaaaaaaaaggtggctgaccagatggccaaaaggaacagctccagtctgcagctcccagcaagatcaatgcaaaaggtgggtgatttttgcatttccaactgaggtacccagcttatctcattgggactggttagacagtgggtgcagcgcatggagggcgagccgaaggagggtgggccattgcctcacccaggaagtgcaaggggtcaaggaattccctcccctagccaagggaagccatgtgggactgtgccttgaagaacagtrcacttcggcccagactacacttttcccacagtcttcgcaacccacagaccaggaagttcccttgggtgactatgccaccagggccctgggtatcaagcacaaaactgggcagctgtttgggcagacaccaagctagctgcaagagtatttttcataccccagtggcacctggaatgccagcgagacagaacagttcattcccctggaaagggggctgaagccagggatccaagtggtctagctcagcggaccccaaccccacagagcccagcaagctaagattcactggcttgaaattctcactgccaccacagcagtctgaagtcaacctggggcactcgggcttggtggggggaggggtgtctgccattactgaagcttgagtagactgttttcccctcacagtgtaaacaaagccaaggggaagttccaacttggtggatccctccgcagctcagcaaagccattgaagccagactgcctctctagattgctcctctctgagcaggacatctctgaaaaaaaaggcagcagccccagtcagggacttatagataaaaacccccatctccctgggacagagcacccaggggaagcagcggtgggcacagcttcagcagacttaaacatccctgcctgctgggtctgaagagagcagcagatctcccaggacagcgttcaagctctgttaagggtcagactgcctcctcaagtgggtccctaacccccattgtagcctgactgggagacaccacccagcaagggttgacagacacctcatagaggagacctctcgctggcatctggcgggtgaccctcagggacaaagcttccagaggaaggagcaggcagcaatttttgctgttctgcagcctccgctggtgatataggtaaacagggtctggagtgggcctccagcaaactccagcagacctgcagaagaggggcctgactgttagaagcaaaactaacaaacagaaaggaacagcaatgacatcaaccaaaaggatgtccacacaaaaactccattcgaagcttaccaacatcaaagacccaaggtagataaatccatgaagatgagaaaaaaatcaatgcacaaaggctgaaaattccaaaaaccagaatgcctcttctcctccaaaggaacagaactcctcaacagcaagggaacaaaactggatggagaatgagtttgacgaattgatagaagtaggctttagaaggtgggtaataacaaactcctctgagctaaaggagcatgttctaacccaatgcaaggaagccaagaacgttgaaaaaaggttagatgaattgctaactggaataaccagtttaaagaagaacataaatgacctgatggagctgaaaaacacagcatgggaactttgtgaagcatatgcaagtatcaatagccaaatagatcaaaccaaagaaaggatatcagagattgaagatcaacttactgaaataaagcatgaagacaagattagagaaaaaagaaggaaaggaaacaaagcctccaagaaatatgagactatgcgaaaagaacaaacctacatttgactggtgtacctaaaagtgatggggagaatggaaccaaaagttggaaaacactcttcaggatattatccaagagaacttccacaacctagcaagtcaggccaacattcaaattcaggaaattcagagaacaccacaaagatactccttgagaagagcaaccctaagacacataatcgtcacattcaccaatgttgaaatgaagaaaaaaatgttaagggcaaccagagagaaaggttaggttacccacaaaggaaagcccatcagactaacagtggatctctctgcagaaaccctacaagacagaagagagtgggggccaatattcaactttcttaaagaaaagaattttcaacccagaatttcatatccagccaaactaagcttcaaaagtgaagaagaaataaaatcctttacagacaagcaaatgctgagagattttgtcaccaccaggcttgccttacaagagctcctaaaggaagcactaaacatggaaaggaaaaaccagtaccagccactgcaaaaacataccaaattgtaaagaccatcaacactatgaagaaactgcatcaacaggcaaaataaccagctagcatcataatgacagaatcaaattcacacataacaatattaaccttacatgtaaatggactaaatgccccaattaaaagaaacagactggcaaattagatagagtcaagaagcaacggtgtgctgtattcaggagaccgatctcacgtgcaaagacacacatagactcaaaataaaggattggaggaatatttaccaagtaaatggaaagcaaaaaaagcaggggttgcaatcctaatatctgataaaacagactttaaaccaacaaagatcaaaaaagacaaagaagggctttacataatggtaaagggattgatgcaacaaaaagagctaactatgctaactctcctaaatatatatgcacccaatacaggaccacccagattcaaaaggcaagttattagagacccacaaagagacttcaactcccatacaataatagtgggagactttaacgacccactgtcaatattagacagatcaatgggacagaaaattaataaggatattcaggacttgaactcagttctggaccaagcagacctaatagacatctacagaactctccaccccaaattcatagaatatacattcttctcagcaccacatcacacttatyctaaaattgaccaacagaattggaagtaaaatactcctcagcaaatgcaaaagaatggaaatcataacaaacagtatctcaaaccacagtgcatcaaattagaactcaggattaagaaactgacccaaaactgcacaactacatggaaattgaacaacctactcctgaatgactactgggtaaataataaaattaaggcagaaaataagttctttgaaaccaatgagaacaaaggcacaacataccagaatctctggtacatacccaaaatagtgtttaaagggaaatttatagcactgaatggccacaagagaaagcaggaaagatctaaaatcgacaccctaacatcacaatgaaaagaactagagaagcgagagcaaacacattcaaaagctaacagaagacaagaaataactaagatcagagcagaactgaagtaaacggagacacgaaaaatccttcaaaaaaaaaaaatcaatgaacccacgagctggttttttgaaaagatcaacaaaatagaccactagccagactaataaagaagaaaacagagaagaatcaaatagacacaataaaaaatgataaaggggatatcaccactggtcccacagaaatataaactaccatcagagaatactataaacacctctctgcaaataaattagaaaatctaaaagaaatggataaattcctggacacatacatacaccctcccaaatctaaatcaggaagaagttgaatccctgaagagaccaataacaagttctgaaattgagacagcaattaatagcctaccaaccagaaaaagtccaggaccaaacagattcacaacagaattctacttgaggtacaaagagctggtaccattccttctgaaactattccaaacaatagaaaaagagggactcctacctaactcaatttatgaggccagcatcttcctgataccacaacctggcagagacacacacacacacacaaaagaaaatttcaggccaatatccctggtgaacattgatgcgaaaatcctcaataaaatactggcaaaccaaatccagcagcacatcaaaaaccttatccaccatgatcaagtaggcttcatctctgggatgcaaggctagttcaacatatgcaaatcaataaacataatccatcatataaacagaaccaatgacaaaaaccgcatgattatctcaacagatgcagaaaaagccttcgataaaattcaacaccccttcacgctaaaaactctcaataaactaggtattgatggaaggtatctcaaaataataagagctatttatgacaaacccacagccaatgtcatactgaatgggcaaaagctggaagctttccctttgaaaaccagaacaagacaaggataccctctctctctattcctattcaacacagtattggaagttctggccagggcaatcaggcaagagaaagaaataaagggtattcagataggaagagaggaagtcatattgtctctgtttgcagatgacatgattgtatatttagaaaactcatcatctcagcccaaaatctccttaagctgataagcaacttcagcaaagtctcaggatacaaaatcaatgtgcaaaaatcacaaacatccctatacaccagtaacagacaaacagccaaatcatgtgtgaactctcattcataattgctacgaagagaataaaatacctaggaatacaacttacaagggatgtgaaggacctcctcaaggagaactacaaaccactgctcaaggaaataagagaggacacaaatggaaaagcattccatrctcatggataggacgaatcaatatcatgaaaatggcaaaatggccatactgcccaaagttatttatagattcaatgctatccccatcaagctaccgttgactttcttcacagaattagaaaaaactactttaaacttcatatggaaccaaaaaagagtctgtatagccaagaaaatcctaagcaaaaaaaattaaagctggaggcatcacattacctgacttcaaactatactacaaggctacagtaacaaatatagcatgatactggtaccaaaacagagatatagaccaatggaacagaacagaggcctcagaaatcacaccacccatctacaaccatctgatctttcacaaacctgagaaaaacaagcaatggggaaaggattccctatttaataaatggtgttaggaaaactggctagtcatatgcagaaaactgaaaatggacaccttccttataccttatgcaaaaattaactcaggatggattaaagacttaaatgtaagacctaaaaccataaaaactctagaagaaaacctaggcaataccattcaggacataggcatgggcaaagatttcatgactaaaacaccaaaagcaatggcaacaaaagccaaaatttacaaatgggatctaattaaactaaagagcttctgcacagcaaaagaaactatcatcagagtgaacaggcaacctacagtgggagaaaagttttgcaatctattcacctgacaaagggctactatccagaatctacaaagaaattaaacaagtttgcaaggtaaaaaacaacctcatcaaaaagtgggtgaaggataaaaacagacacttctcaaagaagacatttatggagccaacaaacatatgaaaaaaagctcttcatcactggtcattagagaaatgcaaatcaaaaccacaacgagataccatctcatgccagttagaataatgatcattaaaaagtcaggaaacaacagatgctggagaggatgtggagaaacaggaacacttttacactgttggtgggagtgtaaattagttaaaccattgtgcaagacagtgtggcaattcctcaaggatctagaacaagaaataccatttgacccagcaatcccataactgggtatatacccaaaggattataaatcattcaactataaagacacatgcacacgtatgtttattgcagcactgttcacaatagcaaagacttggaaccaacacaaatgcccaccaaggatagactggataaagaaaatgtggcacatatacaccatggaatactatgcagccataaaaaggatgagttcatgtcctttgcagggacatggatgaagctggaaaccatcattctcagcaaacacaagaacagaaaaccaaacactgcatattctcactcatatgtgggagttgaacaatgagaacacatggacacagggaggggaacatcacacactggggactgtcgaggggtggggggctgtgggagggatagcattaaggagaaatacctaatatagatgatgggttgatgtgtgtagcaaaccaccatggcatgtgtatacctatgtaacaaacctgcacgttctgcacatgtatctcagaacttaaagtataataaaaactcaaacagctctacattgttatttatttaaaacttcaatttacttgctaagaattatcttttttttttcattctctcttcacttctctcaccagcaatggcatttgggtttttttaaggccactttaaaagacattgaaaataatacctgtttgttttcattctattattcttattacattcatttgtctttgaatgttcccaagttttctggtatgacactacgaatctaagttattccagacttctctattctttcatgtatttagaatacatttttcaaaattcctaggctgaggtattaataacttgcccaaattacctttcaaaatgtatttaccatccctgtattactcagtacaaaaatttgattttttggagacatatttgtacatatttatgggatacatgtagtattttgttacatgcacagaacatgtaatgatcaagtcaggctatttgggctattcatcacctccattattgattatacctatatgttgagaacatcttaagtcctcttttatagtaagtttgaaacatataatactatactatagtcaccctactctgttattgcatattagaattttttccttctgtgtgtttgtacccattaaccaacctctacttcattcaccccccaccacccacacacccttccaatcctctggtgtctatcattctattctctacttccataagatccacttttttagctcttacatatgagtgagaacatgtgatattcttctttctgtgactggcttatgtcacttaagataatgacccttcagttctatccaagttgctgtaaatgccatcatgttagtcttgtttatggctgaatagtattccattgtgtatatatatatattctttaaccattcatccatgatggatacttacgttgattccttatctttgcaattgtgaatggtgctgcaataaacatgggctgcaggtattcctttgatatattaatttcctttcctttggataaatactagttagattactggactgtatggtagctgtttttagttttttgagaaatctccatactgttttccaaaatggctgtactagtttacattcccaccaactcccaccaacaagaattcccttttttctgcatcctcaccagcatctatatttcgtcttcatcttctccttctccttctttgacagggtcttgctctgttgcctgtttcccaggctgaagaacagtggtgattcacaggtgcaatcaggatgcactgcagccttgaactcctagccttaagcaatactcctgcctcagcctcatgcgtagctgagactacaggcatcagacttttgtctttttagtaatagtcattttaactggagtatgatgctatctcattgtgattttaatttgcagtttcccgatgattactgatgttgagcattttttaatatgcccatttgtctttttttgagaaatatctattcatgtcctttgcccatttttcttcttaggcagagtctcattctgttgctcaaactggagtgcagtggtgaaatcgtggctcacagcaacttctgcctcctaggctcaagcaattctcctgcctcccctccccagtggctgggattacaggcgcccaccaccatgcccagctaatttttgtattttagtagagacggggtttcaccatgttggccaggctggtctcaaacttctggtttcaagtgatccacctgcctcagcctcccacagtgctgggattacaggtgtaagccactgcacctggccctttacccactttttagtaggatgatttgtggtcttttactgttgagttgtttgagttccttgtatattctggatactagtcccttgttggataaatatcttgtaaatattttctcccattcaacaagctgtatcttcagtctgttggtttcttgtgtagaagaatttttagtttaatatagtcccatttgtctatttttctttttggtgcctgtgatctagagatcttagctataaaatctttggtcagactgatgtcctgaattgttttccctatgttttcttgtagtagttcataattttgggtcttatgtttaagtccttaactgatttgagttgatttttgtacagggtgagagatgggtccagtttcattcttctgcatatggatatccagttttttctattccatttagtgaagaaagtgtcctttcctcagtgtatatacttggcacctttatagaaaatcagttggtggtaaatgtggtatatgctggcatcagtgttagtgtgtccaggcgggctgatctgggggcttccagtcagcttgctgaggtgctggcaatggcagctgtgggccaggtggatgggcaggtccataggccctgggcatcaggcatggtgtgggtgatggcagttgcagtggcaggacaatcctctggtacccaagtagtcccaactgattttcaaggtggctgcaggccatttcccaggcccacaggtggttcatgtctgtgggtggggggtgtatgctggctgtgatggtagtggcaggttgggtgaacccatctccaggccttcaggatgagtgctcaggcgccaacaggaatagatggggctgagcaatccccaggcccctgcatgggcactagggagaagggagacagaggtgagcctcaggccccccgatggtatatataggcactagctatggtaggcaggggcatggtgatttccaggccctcagtggaatgcttggatgggaggaccagcagctacaccctagccatgttgctggggttgctttcattggcagaagccttaggagggccactgggagcacacactttggccccaggtggtagttgctggtggggtagcctgttctcagggtgcttctaaatgtacggtaccctgctgatggggatggtgggtagcttccagtggcccccacattggatatggaggcagcagccagcagcagcagggtctgcgttagggggaggtcaatggggctcaaggaatctggagttgcaaggtctgtggggtcccagggtaggatgcagtctgctgggctttcaaaatggtaccttgctggagtgccttaagagtggggtaagagggagggtgggtggggtgacccagtgtgagctccccatatgaagcaatgccatcatggggtctccagccagtgccctatgtcctagcaattcattctttgcgctcctggcattctcaaatgttttgtagatgccttcttgtagcagccagtctcgtcccttttcttgaagtcaatgagcatcaaatgtgttcaggattcatgaaataattctgacaataattagtattttttataggaattggaacatggtttattgcagtataccgcagtgtttgtcagctctagaacttacgaagaagaggaagaggagaacaagtttgactcctgtgaacgtttttccttttttctcagggcttgtgtgggtcaaaggactctccagtggctaggattgcaggagtccatggtaggaaggtgggccactgggggctactcacctactctttcctcacattagggagccccctccagactccctgctaatcccagctgagcaggctacttcactttcctcttgtttttcatgctaggtgtcacttccgtgttgaattccagccttctctcttaggtgatctatttttattttacaagttagaaatataagtgcagagaagttaaaacagcaaatctgtggcttccaagagtggcaaagcagtttctagcctatgttggctgagttttgaccaagcctctgatatgcatacacatatatacatgttcatgtacgtgtacttaaaacatttttattcccatgtttaaggctagttgaataggggtgaacacagaaaatcctagcaattcattctttgcactcctggcattctcaaatgttttgtagatgccttcttgtagcagccagtctcgtcccttttcttgaagtcaatgagcatcaaatgtgttcaggattcatgaaataattctgacaataattagtattttttataggaattggaacatggtttattgcagtataccccagtgtttgtcagctctagaacttacgaagaagaggaagaggagaacaagtttgactcctgtgaacattttccttttttctataatttacgcatatgctaacaagcagctagtttcaaaacacaaacttaccttgacaggaactaggtctcactgttgagaatgtagtctcctctctccccacatagccctagggttattcaggatgaaggagaagaaaaaacatacccaagagcattttataattccatccttccttcttgttatgctaaggttactagtaccatgacctatgtgaactcgttttcttgaataagaagaataaaagcgttccgtccatcaaggaagacctcaagagaaattccaggttcaggtctcatggtacaagagccaagtgtttcttcctgaatcattcccaggcctgcttttgatctgagcagtggctttcaaaaaatatgctgatgagattgctctctcacttaagaacttaagaaagagttgaagttcttcaatgtatatccccagcctgaaacttgtcttgaggaagatttgtagtagtaatgaagggtgacagtaacctaagggtgaagaatgtagagagatttttcccaagagcaatccaagatactgcttgaaacatccggggtccactgacatgccccttggactccaggagaaatctggaaatgtctggacctgcaatgagacacacccagcttcaaatgtgtcactctgggcatattctttaatctgagctccaattttctttcttgtaagagtcattacacatggctgttttatttactaattcgttttttaaattaaagaaataaatttgtaggagtaatatagttacattgtttacaagtcaaattcttacatggctcatttccatccatttcatggatgtgttaccttctggtatttattagaatttgctttagactttctgttgctcacctcacagttcttgtgtcatcttagtttcttttctgttttttggtcttttatgcgagaggttttcctcacattgtctgataatccttggcagtcagttcgtattgaagagttagacattagaaagccaagtgaaaatcctgtgtgtgtacaaggtttgttgactggaaagcttcatggggatattcttgcttggacatttcactgaaggacatccaaaaacctgttgccgtttttagattttttttcttggattgttggttttcctggtgatcttactccaatctctttggtgccataattctaccagctgagtatgagaaggagctggggtttctcaatgcagaatatgtacttggttctaatatggtagtctggttctaatattgtagcctttttctcagcaatggttgccacatctgagtcctgaatccctttggaatcagcctctccagagggtgtatgtttagaaccggcgtgagtgaaaggtagtcatccaatgacatgaggtgggtgaaaatattttaactgctttatttataaattttcaactgaccctcctgtttttgaaacccaccagtgtccccacttccataagtccctggatcctcaattttccaagtcttcctggaattctatggagtaaattagcttactgatgcatttcccttacttgccttaggtttctgctcactctgttcccaagtcaattatgacctacctggctgcttccagtttctgaaatgttgtgtgtcagcttcttttccattgcctttgtccttgcaagcttatgccattttaaaaaattcttttgctgtcgtttttgtggagaaatagaaaaatatgtacattcaatccccatgtttaagtggaagtccctcataaaattatattagaaatttattagaaatatatacacacatatgaatatagatagatatacactctcttttttagcatacatagtgcctgttatttagcaggtactaaaaaataatatgtatatgtatatacatgtagcagaaggctaacaggaacttagatacactcaggaatatatgatagcatggaaggttggaacggtgggcctgtgcacaatcaagtcatgaggacttagaaaaagacggaaccatggctgggtgcggaggctcatacctgtaatcccagcactttgggaggccgaggccagtggattacctgaggtcaggagttcaggaccagcttggccaacatggtaaaactctgtctcttaaaaaaaaaaaaaaaaaaaaaaaaaaatacaaaaattagccaggcatagtggcaggcgcctgtaatcccatctactcgggaggctgaggcggaggttgctgtgagccaagatcgcgccattgcagtccagcctgggcaacaagagcaaaactcagtctaaaaaaaaaaaaaaaaaaaaaagaaagaaagaaaagagaaaaagaaaaagagaacctggcaggattcagtaattaagccagagtcagaaggagaagtacttctcaatacagcatggtatcttctgttttttagacacggctctacccagctcaattgattcatgactgtgtgggtgtattttgttttgttttttctttttcagactttgtcaacaggaagtaggtgcccatgttgttgatagaaaagtttgtaagtaggactgcacagacttggttttggttcagcatttggcaataatcagtctttctgcttcagccttcagagagcccacttcatcattctttctggcatccctgtgatcatatgattacatatctaatcagtgtaacaacaacagctacttaaagaaggcatgccattaaagatattgttaatatctctacattgcctttcaaacatatgtaagcattctaacttggagtgaaatcttcttaggtgctttatatgttgaaattctaccagtcagctgaggaagaaatgtatacggcttatccccaaaataagatattccaacaaataatgtttatgagagctgttaatttatgttaaaaaaaaaagctattaataaaatgtttaagtaattaaatttgggagcttgattggcagtaggaatattaagaggattagctagataactaatgtagaaaataatataattgtattgagtcaacaaaagcttatatagatttaattactatgatgatattagattacttcataattagaatctttgtagaattgttttggtataattgcattcacaatactcaaaaagtaagcttaaagaatgatatttttaattatttaattccagtaagtcataagtcttattttttgcattatatgaggctgaattaaaagcagaatgccatctgacatttcaaaatttcatggagagaaatgtatctgaaatcatatacaccaaaaagataagtaaaatttgatagaaaaaaatgaatgtattttagctgagttctgacatgcattttattcacaaatcaaacttcagaacacagaagacaatttcttattttgaatttatagagactattctaatattaaattgatttttacaagctagcaaatattttcaatagttgaagcttcggagtttctcatttatctaagctatgtaaatgcatgcaaagtttcttctagaaaacaaattactgaaagacattttcctgatttgtatttggctgtgttattccccagaaggtgaaattattaaacatgccattcgaaagccagtaactccttagtacaggttgaacatccctaatctgaaaatctgaaatctgaaatgctccaaaatctgaaactttttcaatgccaacatgatgccacaagtagaaaattttacacctgatctcatgtgatgggtaccaatcaaaactttgcttcatgaacaaaactattttaaaatatgtataaaattatcttcaggctatttgttaggaaataaaaataaaactctaagtccctccgactgacccagcggattctctcttggccaagggaaccccagcaaaaccttggaagctgaattcatggctatgatgggatgggagatttggcatatgcctcattatatccccaccctcgctaacagtcgttaggttttcttccttaacagctaaacagaaaccagcctttccaaaagactactagcttatcttcccagatacgtaacagtccagatgagattcattatgttcaccttattttatgtaagatgtagatttaccaggcactaactaaagttttacaagtatgtaatcatttgtctcactgctgccccaccacctcccctgccttttaaggaaaatatataaatactaaacctcctaagaacctctttggaaaaaacagtcacacatgcttctgtgactctctattttcccaggtatgccttcaagctggctcaacaaagcttgatgctttgaaacttatgcttcaattactcatttcagttgtcagtgtaaaaggtgtatatgaaatagaaaagaattctgtgtttagacagttctcatcagtgagatatctcattgtgtatatcccaaaatatttcaaaaaaatgaaatccaaaacacttccagttccaagcatttaggacaagggatattcaatctgtatcagaaacatgcgatggtgaccacaaaaggaatctggcagctgaaaattctgagtcactatcatgtcaaactataaaaattttatacaacttaaaaaaaaaacctgcactaatcattaatttatattattgttaaaattatcatacagtaaaattgattttttttccttttgatgtacagttctgaaaccacctttgcaaaaattgcaacactgagaaaactttgacagtgaaagaaatttgacctaaccaactccacattgcctttaacctccaaactgcccttcattcctgggcatggcctaagctaactttgggagaaatttaggttatagtttaaatgataatagctctttccaaaactaaactgcctttgtaaaactaatgaaaggccaccagtttacgaagataggagggcctgaattctgctaagatataggcatagttaagtgattaccagccattattccagaggtcacaagattttcaacttcctcaattactcctgtaaataacgttactattgtagaacctaaaattactattgtagaacctaaagttgaccttttgagatgtcttgtcaggcttttgcatttctgatgacmccagtgtcctgaaccagtgactcctctgtggacccttactggaagctgactcagggcacacgaggaccattttccacacccatatgattgcatccccaaccaatcagcagcacccattcctttgcccaccaaattactcttgaaaaactctagcctccaaattttcagggaggctgatttgggtaataataaaactctggtctcctgtttagctggctctatttgtattaaactctttctctactgcaattgccctatcttgataaatcagctttatctgagcagcaggcaagaagaacccattagacagttacagttctgtaaattttaacacaaacattgttcatgtaaccaccagtaggatcaccatctggatcagtttcaccacctaaaaagcttcctcataataccctactccatgacactaggaacagctactagttctccatcccaattgtttcatcttttgagaagtttatataaatggaattgtatagtataatcatcaattttaaaataaaatttcagatgtattcacattccataagtgtactctatgatgctgatatttatctttagcctcagcttatgccaaactatgcctttccatatatggccaaaatgtgtattcaatatacctctaactgggaggatcaattgaaagtgttgttttactaaactctataacacaaaggaattcaaggataccatagggatcattcaactgattataacacaaaatggggagagccaatttccctgtccccagagacctctgggcagctctagctccctgagggasscagcacaacagtggtccctttctcaggagatacctgggacaccaggcagttcctcttagaccttctgggagaggggttcccagcagacgctggataggagcaatagcactgagaaggggtagcagaagcagcagtggccttgacttgtgtatgtgcacatatgcaaggagcccttgcgagactcccttctccccaggtagtagggtcttgcttgccttgctagtggcaagaaccactaaagtttagttgttactgttaacgtaaccctatttctacttacaatgtggtgaggccttggaaaacccaagttatataaacatttgtcttagttcatttaggctgctttaacaaaaataccataaactgggtggtttataaacaacgaacatttatttctcacagttctggaggctgagaagtccgagatcatgctgccagcagattcactgtctggtgtggtcccatccctacacagtgaaagcagcaaggtcactttctgtgcctgatttataaggacactaatcccgatcatgaggactcaaccctcatgacctaatcacctatcaaaaagccccatcaccttagggtttaggatttcaaaatatgaattttgggtagacacaaacattcagactgcagcaacattcaatagaggcaactcacctaccaggaggcaacttttcattctgatgcccaggtatgacagacctcaaatctgttaccgtcccatgaaccaggaattatacaaagggtagaggggcatagctctgggtgaagagctgcactctgttcactctgggctctgtgtggtggtgtcccaggtagtgtcagtccagctgttaagtccagtgaggctcagaaaggtgatgtcatttgttcaaatcttccagctagtttgttggtcagatcataaccagaccctatgaagtctaatcatacccagttctgtaggctttcctcttcaataggtccattcttatctctaactgagaccacctgcatcctcatagcttaactatcagtatggaaaacaaaccatctgtgtcactatgactttactatttgttcaagaaaattcttgtccaggaagataagacggtgtacaataaataacatcaatgtttacttcagaaaatttctgaaaaccaatttattcagatgatagattgctcatttgaaaaaataaaccccttttcaggacaacagattcctctccaagtctaataacttgtttatcaaagatctatttttcaggacttcaagaccctcttatcacaatgtccaccaattctaaactataatatcatgaactttgccgaatttccaccagatttcttccttgaaaggcctgactttaaaccacttgagctcagacccttaatgtttataaatatctacctgtgacctctcccttttgagaattataaggactttttcaaggtgttgcactctcttactgcaggttaataaacttagctttgtttgatcaatagtttattctgatggtcttctttgaaagtcagcaatcaacagttctggggcctcagtaggattcactcaataatttctgctcctgcagtttaagaaccttagccctaaacagtgtgttcttctgaagtttgccatttggaagcctcccccactgcagtgttaaggtaagtctctcattggatttgagtcccggtgtcctttccataaagctcttaaattgtttatttttcttcctagaaataagaaacttttaagaaattcctggattatctgatcagatttgaaaatgtttattctttgtggaaatgttttattactagtaacattactctttttgtcttttatcctatttgttgtgagtctatgagaagaagctcacagggaagaagacagccgtagacctggcaattttgtcctcaaactggctcaaagatacaataatatcagcgggtctcatcaaactggcattcttatagaataaactttgctctgggtcacttactaatatcttacagaaaatttatagcagcagttgtatattgagggtgtgaataaaaaccaccagagaagctttttgaaaaaatactatgaatagatttctgcttctggccaaaatgaagaaacagggaccagatttactctccagtaaaccagtggaaaaaaaaacagacacaatattgaaaaataaaaagatttttcaagacatcaggcaatgaagaatagtgatccaagagaaacaagaaacaagatgaatcttatgttcgccacagcttactgtctggagtgagtatcaagactgtggtacagaaagggaaaacccagatggaaccctgccatctccctaagtggagtctggggagggcaaagtgagtagagtttgcaaggaaagatatgggaaaggagacagctgtgcagagagaacactggggatctgtacagggtcttcagctgagcatgagtcagcatatgcatgtgaggaaactacccatgactggggaaagaatcagctggaatgattacggggtatagaatccagggctcagaatcattcctgtttctataggaaatgggcattgagtagcatacttggaagaatttttgcttcagtcatgcagtaacatagaacttagactaaatactactctgataccacataatgaaactcaaaataagacccaaaagaatcaaactgtttataagtaactgagtttcaaaataaagttcaagaatatttatagaaataccatctaacaaagcacaaaattaagataaagggtcaaactatttgcaagtaattttaagtgtgttctagaacaaagttcaaaagtatttatagaaatacaaaaggatccaaaaactgtccacaaaaatatgacccataatgaagagaaaaatcagtcatttgaaactaacccagaaatgacaaagatgatagaatcggcaaagacattagaagaactgtaattgtacttcgcatgttcaagaagccagaggaaagactgaacatggtaagcagaaacatggaagatataaaaagactaaaaatcaaactttagagatgaaaacattatgtgagatgaaaaacacactgagtagaattaaaggcaaattggaaatttcagaagactagtgactttaagaattgagagataaaaagtacacaaaatgagaaacagaagtgtgtcagtgagttatgggacaacttcaaactaatgcgtaaattgcagtccctgaaggaaatgagggatatgttggaaaaaaatatttgaaaaaataatggccaaaaatctcccaaagtttatgaaaaccacagattcaagaaggtcaacaaattgcttaaaaatagagaaagtctaatattaggatacaaggtcttgaccaggtgtggtggttcatgcctgtaatcccagcactttggaaggccgagtgggaggtgaatcacttgaggtcaggagttcaagaccagcctggccaacatggtgaaagcctgtctctactaaaaacacaaaaattagcccggcgtggtggtgcacactataatcccagctactcgggaggctgagacaggagaatcacttgaacacaggaggtgcaggttgcagtgagccgagatttgtgcattgcactccagccctgggtgacaaagtgagactccgtcttaaaaaagacaaaaacaaaaacaaaaacaaaaaaatggaaataaggtctcaaattaataacttcagcttacaccttaaaaaaaattagaaatatcatt

SEQ ID NO: 2 - protein, 809 aa, Homo sapiens
MEAEGSSAPARAGSGEGSDSAGGATLKAPKHLWRHEQHHQYPLRQPQFRLLHPHHHLPPPPPPSPQPQPQCPLQPPPPPPLPPPPPPPGAARGRYASSGATGRVRHRGYSDTERYLYCRAMDRTSYAVETGHRPGLKKSRMSWPSSFQGLRRFDVDNGTSAGRSPLDPMTSPGSGLILQANFVHSQRRESFLYRSDSDYDLSPKSMSRNSSIASDIHGDDLIVTPFAQVLASLRTVRNNFAALTNLQDRAPSKRSPMCNQPSINKATITEEAYQKLASETLEELDWCLDQLETLQTRHSVSEMASNKFKRMLNRELTHLSEMSRSGNQVSEFISNTFLDKQHEVEIPSPTQKEKEKKKRPMSQISGVKKLMHSSSLTNSSIPRFGVKTEQEDVLAKELEDVNKWGLHVFRIAELSGNRPLTVIMHTIFQERDLLKTFKIPVDTLITYLMTLEDHYHADVAYHNNIHAADVVQSTHVLLSTPALEAVFTDLEILAAIFASAIHDVDHPGVSNQFLINTNSELALMYNDSSVLENHHLAVGFKLLQEENCDIFQNLTKKQRQSLRKMVIDIVLATDMSKHMNLLADLKTMVETKKVTSSGVLLLDNYSDRIQVLQNMVHCADLSNPTKPLQLYRQWTDRIMEEFFRQGDRERERGMEISPMCDKHNASVEKSQVGFIDYIVHPLWETWADLVHPDAQDILDTLEDNREWYQSTIPQSPSPAPDDPEEGRQGQTEKFQFELTLEEDGESDTEKDSGSQVEEDTSCSDSKTLCTQDSESTEIPLDEQVEEEAVGEEEESQPEACVIDDRSPDT

SEQ ID NO: 3 - protein, 150 aa, Homo sapiens
MDRTSYAVETGHRPGLKKSRMSWPSSFQGLRRFDVDNGTSAGRSPLDPMTSPGSGLILQANFVHSQRRESFLYRSDSDYDLSPKSMSRNSSIASDIHGDDLIVTPFAQVLASLRTVRNNFAALTNLQDRAPSKRSPMCNQPSINKATITV

SEQ ID NO: 4 - protein, 745 aa, Homo sapiens
MAQQTSPDTLTVPEVDNPHCPNPWLNEDLVKSLRENLLQHEKSKTARKSVSPKLSPVISPRNSPRLLRRMLLSSNIPKQRRFTVAHTCFDVDNGTSAGRSPLDPMTSPGSGLILQANFVHSQRRESFLYRSDSDYDLSPKSMSRNSSIASDIHGDDLIVTPFAQVLASLRTVRNNFAALTNLQDRAPSKRSPMCNQPSINKATITEEAYQKLASETLEELDWCLDQLETLQTRHSVSEMASNKFKRMLNRELTHLSEMSRSGNQVSEFISNTFLDKQHEVEIPSPTQKEKEKKKRPMSQISGVKKLMHSSSLTNSSIPRFGVKTEQEDVLAKELEDVNKWGLHVFRIAELSGNRPLTVIMHTIFQERDLLKTFKIPVDTLITYLMTLEDHYHADVAYHNNIHAADVVQSTHVLLSTPALEAVFTDLEILAAIFASAIHDVDHPGVSNQFLINTNSELALMYNDSSVLENHHLAVGFKLLQEENCDIFQNLTKKQRQSLRKMVIDIVLATDMSKHMNLLADLKTMVETKKVTSSGVLLLDNYSDRIQVLQNMVHCADLSNPTKPLQLYRQWTDRIMEEFFRQGDRERERGMEISPMCDKHNASVEKSQVGFIDYIVHPLWETWADLVHPDAQDILDTLEDNREWYQSTIPQSPSPAPDDPEEGRQGQTEKFQFELTLEEDGESDTEKDSGSQVEEDTSCSDSKTLCTQDSESTEIPLDEQVEEEAVGEEEESQPEACVIDDRSPDT

SEQ ID NO: 5 - protein, 215 aa, Homo sapiens
MAQQTSPDTLTVPEVDNPHCPNPWLNEDLVKSLRENLLQHEKSKTARKSVSPKLSPVISPRNSPRLLRRMLLSSNIPKQRRFTVAHTCFDVDNGTSAGRSPLDPMTSPGSGLILQANFVHSQRRESFLYRSDSDYDLSPKSMSRNSSIASDIHGDDLIVTPFAQVLASLRTVRNNFAALTNLQDRAPSKRSPMCNQPSINKATITGLYNGIIAFL

SEQ ID NO: 6 - protein, 675 aa, Homo sapiens
MMHVNNFPFRRHSWICFDVDNGTSAGRSPLDPMTSPGSGLILQANFVHSQRRESFLYRSDSDYDLSPKSMSRNSSIASDIHGDDLIVTPFAQVLASLRTVRNNFAALTNLQDRAPSKRSPMCNQPSINKATITEEAYQKLASETLEELDWCLDQLETLQTRHSVSEMASNKFKRMLNRELTHLSEMSRSGNQVSEFISNTFLDKQHEVEIPSPTQKEKEKKKRPMSQISGVKKLMHSSSLTNSSIPRFGVKTEQEDVLAKELEDVNKWGLHVFRIAELSGNRPLTVIMHTIFQERDLLKTFKIPVDTLITYLMTLEDHYHADVAYHNNIHAADVVQSTHVLLSTPALEAVFTDLEILAAIFASAIHDVASPHPGVSNQFLINTNSELALMYNDSSVLENHHLAVGFKLLQEENCDIFQNLTKKQRQSLRKMVIDIVLATDMSKHMNLLADLKTMVETKKVTSSGVLLLDNYSDRIQVLQNMVHCADLSNPTKPLQLYRQWTDRIMEEFFRQGDRERERGMEISPMCDKHNASVEKSQVGFIDYIVHPLWETWADLVHPDAQDILDTLEDNREWYQSTIPQSPSPAPDDPEEGRQGQTEKFQFELTLEEDGESDTEKDSGSQVEEDTSCSDSKTLCTQDSESTEIPLDEQVEEEAVGEEEESQPEACVIDDRSPDT

SEQ ID NO: 7 - protein, 15 aa, Homo sapiens
MMHVNNFPFRRHSWI

SEQ ID NO: 8 - protein, 687 aa, Homo sapiens
MAFVWDPLGATVPGPSTRAKSRLRFSKSYSFDVDNGTSAGRSPLDPMTSPGSGLILQANFVHSQRRESFLYRSDSDYDLSPKSMSRNSSIASDIHGDDLIVTPFAQVLASLRTVRNNFAALTNLQDRAPSKRSPMCNQPSINKATITEEAYQKLASETLEELDWCLDQLETLQTRHSVSEMASNKFKRMLNRELTHLSEMSRSGNQVSEFISNTFLDKQHEVEIPSPTQKEKEKKKRPMSQISGVKKLMHSSSLTNSSIPRFGVKTEQEDVLAKELEDVNKWGLHVFRIAELSGNRPLTVIMHTIFQERDLLKTFKIPVDTLITYLMTLEDHYHADVAYHNNIHAADVVQSTHVLLSTPALEAVFTDLEILAAIFASAIHDVDHPGVSNQFLINTNSELALMYNDSSVLENHHLAVGFKLLQEENCDIFQNLTKKQRQSLRKMVIDIVLATDMSKHMNLLADLKTMVETKKVTSSGVLLLDNYSDRIQVLQNMVHCADLSNPTKPLQLYRQWTDRIMEEFFRQGDRERERGMEISPMCDKHNASVEKSQVGFIDYIVHPLWETWADLVHPDAQDILDTLEDNREWYQSTIPQSPSPAPDDPEEGRQGQTEKFQFELTLEEDGESDTEKDSGSQVEEDTSCSDSKTLCTQDSESTEIPLDEQVEEEAVGEEEESQPEACVIDDRSPDT

SEQ ID NO: 9 - protein, 585 aa, Homo sapiens
MKEQPSCAGTGHPSMAGYGRMAPFELASGPVKRLRTESPFPCLFAEEAYQKLASETLEELDWCLDQLETLQTRHSVSEMASNKFKRMLNRELTHLSEMSRSGNQVSEFISNTFLDKQHEVEIPSPTQKEKEKKKRPMSQISGVKKLMHSSSLTNSSIPRFGVKTEQEDVLAKELEDVNKWGLHVFRIAELSGNRPLTVIMHTIFQERDLLKTFKIPVDTLITYLMTLEDHYHADVAYHNNIHAADVVQSTHVLLSTPALEAVFTDLEILAAIFASAIHDVDHPGVSNQFLINTNSELALMYNDSSVLENHHLAVGFKLLQEENCDIFQNLTKKQRQSLRKMVIDIVLATDMSKHMNLLADLKTMVETKKVTSSGVLLLDNYSDRIQVLQNMVHCADLSNPTKPLQLYRQWTDRIMEEFFRQGDRERERGMEISPMCDKHNASVEKSQVGFIDYIVHPLWETWADLVHPDAQDILDTLEDNREWYQSTIPQSPSPAPDDPEEGRQGQTEKFQFELTLEEDGESDTEKDSGSQVEEDTSCSDSKTLCTQDSESTEIPLDEQVEEEAVGEEEESQPEACVIDDRSPDT

SEQ ID NO: 10 - protein, 507 aa, Homo sapiens
MASNKFKRMLNRELTHLSEMSRSGNQVSEFISNTFLDKQHEVEIPSPTQKEKEKKKRPMSQISGVKKLMHSSSLTNSSIPRFGVKTEQEDVLAKELEDVNKWGLHVFRIAELSGNRPLTVIMHTIFQERDLLKTFKIPVDTLITYLMTLEDHYHADVAYHNNIHAADVVQSTHVLLSTPALEAVFTDLEILAAIFASAIHDVDHPGVSNQFLINTNSELALMYNDSSVLENHHLAVGFKLLQEENCDIFQNLTKKQRQSLRKMVIDIVLATDMSKHMNLLADLKTMVETKKVTSSGVLLLDNYSDRIQVLQNMVHCADLSNPTKPLQLYRQWTDRIMEEFFRQGDRERERGMEISPMCDKHNASVEKSQVGFIDYIVHPLWETWADLVHPDAQDILDTLEDNREWYQSTIPQSPSPAPDDPEEGRQGQTEKFQFELTLEEDGESDTEKDSGSQVEEDTSCSDSKTLCTQDSESTEIPLDEQVEEEAVGEEEESQPEACVIDDRSPDT

SEQ ID NO: 11 - DNA, 483 bp, Homo sapiens
atagttggcgtaccctgaggcctgccagttcctgccttaatgcatatgtagtcgtaattgagttctgacacggccttggatgtttctgtcctaaatagctgacattgcatcttcaagactgtcattccagttggcttttgagtggatacgtgcagtgagatcattgacactggaaacactagttcccattttaattacttaaaacaccacgatgaaaagaaatacctgtgatttgctttctcggagcaaaagtgcctctgaggaaacactacattccagtaatgaagaggaagaccctttccgcggaatggaaccctatcttgtccggagactttcatgtcgcaatattcagcttccccctctcgccttcagacagttggaacaagctgacttgaaaagtgaatcagagaacattcaacgaccaaccagcctccccctgaagattctgccgctgattgctatcacttctgcagaatccagtgg

SEQ ID NO: 12 - protein, 90 aa, Homo sapiens
MKRNTCDLLSRSKSASEETLHSSNEEEDPFRGMEPYLVRRLSCRNIQLPPLAFRQLEQADLKSESENIQRPTSLPLKILPLIAITSAESS

SEQ ID NO: 13 - DNA, 782 bp, Homo sapiens
ttctcactgccctgcggtgttttgaactgccttcttacagacgtcatacagcccttgaggaatagtttctgcctggtgagattgaatgatagttctcattcacaaaaccctggattctaagcagggacacacagaaattactttcgcaggtaaatcagcccacccagccaaagtgtggagagatttgttccttggctgacttctttgctccacggagaggagtgttttcctgtgcttgccctgaaatggaacttccttgacagctctcccgtgttacagtacctcccggtcattttctttttctctctctctacctgcgctcttcgagtgtcagaaacctttaaagctgttactatggaattgcaaaaaagagatcaagtgactctttcactatgctggtttcccttgtgacccagatgaagaatcaattcagaattcagttcctcccttggcattgcaagacacagaagaaactgtcacttcctaacagcctagtactggagtaaattcagtatgaaggaagaaagcgctcctgcgtgttagaaccttgcccatgagctggaccgaggacaggagatggactccaggaaaattggatttcttcaagcagcctcccttggaaatggaatatctttaaaatcttctttgcagaaagacagttagaatgtattaatcagaatagttgaagacttattttcctttttattttttttcaaaatgagcattattatgaagccaagatcccgatctacaagttccctaaggactgcagaggcagtttg

SEQ ID NO: 14 - protein, 21 aa, Homo sapiens
MSIIMKPRSRSTSSLRTAEAV

SEQ ID NO: 15 - DNA, 16 bp, Homo sapiens
agcctttgggccaaca

SEQ ID NO: 16 - DNA, 25 bp, Homo sapiens
caaaccaacaggagtatgtactttt

SEQ ID NO: 17 - DNA, 25 bp, Homo sapiens
aaatgaatggtagatttaacctgag

SEQ ID NO: 18 - DNA, 20 bp, Homo sapiens
tgggaaaataaatacatgcg

SEQ ID NO: 19 - DNA, 25 bp, Homo sapiens
ttataccaggagagtagactttttt

SEQ ID NO: 20 - DNA, 23 bp, Homo sapiens
catgctaatttcaaatatgagag

SEQ ID NO: 21 - DNA, 17 bp, Homo sapiens
gcatttgtcatgtgcca

SEQ ID NO: 22 - DNA, 22 bp, Homo sapiens
ggtatttcattcacagccagtc

SEQ ID NO: 23 - DNA, 20 bp, Homo sapiens
ttaaaggagtgatctccccc

SEQ ID NO: 24 - DNA, 23 bp, Homo sapiens
gttacagtacctatggtcatgcc

SEQ ID NO: 25 - DNA, 19 bp, Homo sapiens
gcactgtgaatttcaaatg

SEQ ID NO: 26 - DNA, 16 bp, Homo sapiens
gtcaggggactgggat

SEQ ID NO: 27 - DNA, 25 bp, Homo sapiens
cctgtaaacaatgaaaacccactga

SEQ ID NO: 28 - DNA, 23 bp, Homo sapiens
agactatgctgtgtgtgtgcctg

SEQ ID NO: 29 - DNA, 21 bp, Homo sapiens
tctgggtttacaaccttcaaa

SEQ ID NO: 30 - DNA, 16 bp, Homo sapiens
taactggcttggcccg

SEQ ID NO: 31 - DNA, 25 bp, Homo sapiens
cagtaaatagtttgcttcaggcatt

SEQ ID NO: 32 - DNA, 20 bp, Homo sapiens
ctcatactctgcgtggcttg

SEQ ID NO: 33 - DNA, 20 bp, Homo sapiens
agggctaagtggatcacagc

SEQ ID NO: 34 - DNA, 20 bp, Homo sapiens
agagggtcttgccactgtgt

SEQ ID NO: 35 - DNA, 20 bp, Homo sapiens
tctgcaagactctcggtgct

SEQ ID NO: 36 - DNA, 24 bp, Homo sapiens
tgcagatctcatatttccatgttt

SEQ ID NO: 37 - DNA, 20 bp, Homo sapiens
tctgccctttgttcctcatc

SEQ ID NO: 38 - DNA, 20 bp, Homo sapiens
gtcaagggagtgatggcagt

SEQ ID NO: 39 - DNA, 20 bp, Homo sapiens
aaaatgactgcctcccacaa

SEQ ID NO: 40 - DNA, 20 bp, Homo sapiens
gggaaatcatactgccctca

SEQ ID NO: 41 - DNA, 20 bp, Homo sapiens
aaacatagccaccctgttgc

SEQ ID NO: 42 - DNA, 22 bp, Homo sapiens
tccaaagcccttagcttaatca

SEQ ID NO: 43 - DNA, 20 bp, Homo sapiens
gctccctggactgtggtaaa

SEQ ID NO: 44 - DNA, 20 bp, Homo sapiens
gccacattgctgtcacattt

SEQ ID NO: 45 - DNA, 20 bp, Homo sapiens
tttttcagggctgggtagaa

SEQ ID NO: 46 - DNA, 22 bp, Homo sapiens
tccaaaggaagtgaaatcagtg

SEQ ID NO: 47 - DNA, 20 bp, Homo sapiens
ctaacccatcctcacccaat

SEQ ID NO: 48 - DNA, 20 bp, Homo sapiens
tgtggcatacagggaagtga

SEQ ID NO: 49 - DNA, 20 bp, Homo sapiens
gtgctggaatttggctccta

SEQ ID NO: 50 - DNA, 20 bp, Homo sapiens
caaacatcattttgccttgc

SEQ ID NO: 51 - DNA, 20 bp, Homo sapiens
tcccaaacgatagctgttgc

SEQ ID NO: 52 - DNA, 20 bp, Homo sapiens
gaattaggacggtggctcaa

SEQ ID NO: 53 - DNA, 21 bp, Homo sapiens
tttgcattcatcactcattcg

SEQ ID NO: 54 - DNA, 20 bp, Homo sapiens
cccgtagcatctgatccagt

SEQ ID NO: 55 - DNA, 20 bp, Homo sapiens
agaaagcttcccctccactg

SEQ ID NO: 56 - DNA, 20 bp, Homo sapiens
cattccagcctgagctacaa

SEQ ID NO: 57 - DNA, 20 bp, Homo sapiens
tgggctccaattatccttcc

SEQ ID NO: 58 - DNA, 20 bp, Homo sapiens
tgcagtttgcactctccttg

SEQ ID NO: 59 - DNA, 21 bp, Homo sapiens
ttatctgttccccatgctttt

SEQ ID NO: 60 - DNA, 25 bp, Homo sapiens
tgttacatcttgatctatgacgttt

SEQ ID NO: 61 - DNA, 20 bp, Homo sapiens
tgtatcctgcatcccttgtt

SEQ ID NO: 62 - DNA, 27 bp, Homo sapiens
ggaataacccaaaagtaattgtagtga

SEQ ID NO: 63 - DNA, 20 bp, Homo sapiens
tcgtgccaagatgaaaatga

SEQ ID NO: 64 - DNA, 21 bp, Homo sapiens
aaacctccctgatcatctgaa

SEQ ID NO: 65 - DNA, 20 bp, Homo sapiens
acagaggagcaaaggaatca

SEQ ID NO: 66 - DNA, 20 bp, Homo sapiens
ttggcacgaatcactctctg

SEQ ID NO: 67 - DNA, 20 bp, Homo sapiens
ccccatttggatgatggtaa

SEQ ID NO: 68 - DNA, 25 bp, Homo sapiens
tgagaacatctaacgtctttttcaa

SEQ ID NO: 69 - DNA, 20 bp, Homo sapiens
ggcacagataactgggaagc

SEQ ID NO: 70 - DNA, 21 bp, Homo sapiens
cccccaaaagtactgcataaa

SEQ ID NO: 71 - DNA, 20 bp, Homo sapiens
atgttggcatttggtgaggt

SEQ ID NO: 72 - DNA, 20 bp, Homo sapiens
cacctgtccctttggaggta

SEQ ID NO: 73 - DNA, 26 bp, Homo sapiens
ttttaaacgtgaaaagtacaagttgc

SEQ ID NO: 74 - DNA, 21 bp, Homo sapiens
acaaagagcacctttccagtg

SEQ ID NO: 75 - DNA, 20 bp, Homo sapiens
tgcttggtgaaggaatagcc

SEQ ID NO: 76 - DNA, 20 bp, Homo sapiens
gagcctgggttctcaggaat

SEQ ID NO: 77 - DNA, 20 bp, Homo sapiens
ggcaagaacagtttggagga

SEQ ID NO: 78 - DNA, 20 bp, Homo sapiens
gactgctgtttgctggttga

SEQ ID NO: 79 - DNA, 24 bp, Homo sapiens
aaatggctataaagtgctttgaac

SEQ ID NO: 80 - DNA, 20 bp, Homo sapiens
cggtctcaacaaccagaaca

SEQ ID NO: 81 - DNA, 24 bp, Homo sapiens
cagaaacacacagaagtcattcaa

SEQ ID NO: 82 - DNA, 21 bp, Homo sapiens
cagacccaattaatggcaaaa

SEQ ID NO: 83 - DNA, 23 bp, Homo sapiens
tctgtcttctttgacccatgaat

SEQ ID NO: 84 - DNA, 20 bp, Homo sapiens
caacacagcgagacctcatc

SEQ ID NO: 85 - DNA, 151 bp, Homo sapiens
acaaagagcacctttccagtggacaactaactaaagtggtgtgattttggtataagtttgtgtgtgtgtgtgtgtgtgtgttgtgtgtgtgtgtatgtgtatacatttagttttattgtaacaaagcaacttgtacttttcacgtttaaaa

SEQ ID NO: 86 - DNA, 194 bp, Homo sapiens
tgcttggtgaaggaatagccaccccagagaaggagtatggacttctatacacaatcattcattcattcattcattcattcattcattcattcattcactactcatgcatgatctttgtccttatcttcctccactgtcacatgaatacccacccactgcacctacctgcttcctattcctgagaacccaggctc

SEQ ID NO: 87 - DNA, 23 bp, Homo sapiens
ggcaatggaggagttccgggaca

SEQ ID NO: 88 - DNA, 91 bp, Homo sapiens
ggcctcgagcagaacttcccatttgagtgggaccaagaagagcatacaaagctgaaatgttctccagaagttgatttccaatggggataaa

SEQ ID NO: 89 - DNA, 56 bp, Homo sapiens
tgattacaggttttagagaagaggaacaatgcttcctctgagcctgaagaaaagaa

SEQ ID NO: 90 - DNA, 170 bp, Homo sapiens
agttctgaccatgtcctgtgtcactctcaagcagagattgaaaatgacattcgtcctttacttgttccaaggaagcaaacattttatagtttgaaactgtttctcttgcatttgctttgcaagaggtttgcagaagttaagcctcatggagtcttctctccttaacttaa

SEQ ID NO: 91 - DNA, 49 bp, Homo sapiens
tgtgaagaatttggaaattgcaaggagcatgggaaggagatgatttggg

SEQ ID NO: 92 - DNA, 149 bp, Homo sapiens
gaatgaagaggaaatcaagacatacttagataaaaacagattatcaccaggagatctgctgtaaaagaatggctaaaggaagttagctaagcagaaaggaagtaacataaaaaggaaccttggaacatcagggaggacaaaagaacatg

SEQ ID NO: 93 - DNA, 282 bp, Homo sapiens
tttctctttctccaatcactcactctggaggcagctagctgtcaactcacaaagacactcaagcagcctatggaagaaggccacatggtaaaatatggaggcctccagccaacagtcagcaaggaactgagacaagtcaacaaccatgtgagtgactcgagaagtgcttctctagctccagttgagacttgcagtagcagcagcctcagctggcggcttgactgcaatctcttgagagaccctaagctctcctgaattcttgatccttagaaactgtgtgag

SEQ ID NO: 94 - DNA, 123 bp, Homo sapiens
ggtctagctgtgtcccagagagcaacttcccttttcaaggcagcccactctgtgtgatgctttttcctaggtatgggcaacccatccctcctagggtgaaaacttcgctgttgctagttccag

SEQ ID NO: 95 - DNA, 136 bp, Homo sapiens
aatgatgccgtattattctcctgacctaacttcaaagaaataaagagtttgcaagaagaactgcagttcttcaaagtacgcaatatggatttccaagatgaatgtagtttctctctctgaggaattctgaacagtg

SEQ ID NO: 96 - DNA, 73 bp, Homo sapiens
gacttgagcatctgaagattttggtttctgcagagggtgggaaaggttgaaccaatcccccatggataccaag

SEQ ID NO: 97 - DNA, 86 bp, Homo sapiens
ggctttccagatccctgaagataaaatacaaactctccaacaagaccttttggccatcaggaacgcagcacctggctctctcacta

SEQ ID NO: 98 - DNA, 58 bp, Homo sapiens
aaagtcgcagagatagcggagaacaagaaccagatctcacagtcatggtgccaaaaga

SEQ ID NO: 99 - DNA, 128 bp, Homo sapiens
ctgttaccctagcatgactgcttcagcgaagagataagagcttctttgactttttccactggaatttttcatgccagaagaaattgaacatgtgagcctggtgtctggaagagtagcctggatttatg

SEQ ID NO: 100 - DNA, 135 bp, Homo sapiens
aattcagctgttaccctagcatgactgcttcagcgaagagataagagcttctttgactttttccactggaatttttcatgccagaagaaattgaacatgtgagcctggtgtctggaagagtagcctggatttatg

SEQ ID NO: 101 - DNA, 72 bp, Homo sapiens
ttccttgatagttccaatatctgtaatcttgttggtctacctgtgcagtttattccactgattgtctctcag

SEQ ID NO: 102 - DNA, 76 bp, Homo sapiens
gcgaaaatactgaggctcaacagacataaaatggcttgagttaccaggctacagtagaactaggatttcagtccag

SEQ ID NO: 103 - DNA, 239 bp, Homo sapiens
cattttgttttccatttaaattctagagatttcttatttgtttatacttttaattcatatcattgtagaatagtaatattatctatattgtctgattttccaggctgtgtttacagatttggagattcttgcagcaatttttgccagtgcaatacatgatgtagatcatcctggtgtgtccaatcaatttctgatcaatacaagtaagtaaactttattttttcagaacacatttttcc

SEQ ID NO: 104 - DNA, 245 bp, Homo sapiens
ttgtacattttagaatgactaagggtctttataaactcagagtcttccagagccataatgttcttttgagatgtgtatatatgtgttttagtgatagttcatgttaatgtaatttaactgaaaattatcattatatcccttgaggcatgtgatatttgaaaaatgtgttccagttctctttaaaagtaatatattgctgtgttactagacaagggtaattaaaaatgaaagtgtgcagaaagatt

SEQ ID NO: 105 - DNA, 101 bp, Homo sapiens
agtcatctgaacctgactgcatagagaatggagtactaacttaaaaaaaatgaataaagcccctgctggctactaaccttagaatatagttttttcagtca

SEQ ID NO: 106 - DNA, 63 bp, Homo sapiens
tttcttgtgtcctgcttctttcttcatatccatttctctctcttattgaccctttgctccagc

SEQ ID NO: 107 - DNA, 68 bp, Homo sapiens
agtcatctgaacctgactgcatagagaatggagtactaacttaaaaaaaatgaataaagcccctgctg

SEQ ID NO: 108 - DNA, 93 bp, Homo sapiens
ctactaaccttagaatatagttttttcagtcactttcttgtgtcctgcttctttcttcatatccatttctctctcttattgaccctttgctcc

SEQ ID NO: 109 - DNA, 93 bp, Homo sapiens
tgtgaacaaatggggtcttcatgttttcagaatagcagagttgtctggtaaccggcccttgactgttatcatgcacaccatttttcaggtaag

SEQ ID NO: 110 - DNA, 62 bp, Homo sapiens
tggttgagttctattacatttattttatttaggaacttaatgtccagtctgtagcttatgca

SEQ ID NO: 111 - DNA, 102 bp, Homo sapiens
aagttctgctggaaggcactgttctaaattgtcaggacaacttaaaaattctttgggcatatcttcctgtatctcagagtatgcatatatatttcacttaaa

SEQ ID NO: 112 - DNA, 71 bp, Homo sapiens
tttcctcttctattatttcattttacttttctgtttttcagtttaaaaggatgcttaatcgggagctcacc

SEQ ID NO: 113 - DNA, 92 bp, Homo sapiens
accagtttgaggttggcagagtagaagaaggagggtattttaggccgagaatttggtaagacagagatgggattgtcagctgtatggtgaag

SEQ ID NO: 114 - DNA, 67 bp, Homo sapiens
tggaggagtactagtctttcaggaacagagcaaatgtaatagagcagctgaaaataggcttggcgtt

SEQ ID NO: 115 - DNA, 40 bp, Homo sapiens
cagtgctactgcctggaaaactccttatgttggagaggtc

SEQ ID NO: 116 - DNA, 91 bp, Homo sapiens
aagagctaatacacttattttaaacaatatttcttaaatatttcaaacacagtaatataatatacagcttagaattgattatattaacgga

SEQ ID NO: 117 - DNA, 51 bp, Homo sapiens
gcatacaatgggcaccataataactatcttgaaaagtcagtgtaagagttc

SEQ ID NO: 118 - DNA, 109 bp, Homo sapiens
aaagaatatatacaaaagagctagctaatatagtatctgacaatagtaggcactgtatctgttgttattgctattatttgggttttaggtcaaacttcattggttgcct

SEQ ID NO: 119 - DNA, 101 bp, Homo sapiens
ccatgggcctgagttcttaattctattgtgtggttgattctgtgtaagaaaatgaagagcagaatcaaaagccacttagcaatgtgcaagcattagtgtat

SEQ ID NO: 120 - DNA, 63 bp, Homo sapiens
ttttcaaggtgattcgacagtagtttttcagctaaatgaatttgagcagctagttactttccc

SEQ ID NO: 121 - DNA, 68 bp, Homo sapiens
atttggcacagctcctcatcagaatgaccaattattgctctcttactgggacttttaccccctgctgt

SEQ ID NO: 122 - DNA, 101 bp, Homo sapiens
gcattaggcacctttattctcatctgagtaacaaattcttagttttataaaatatagtttgttttcataatttgattctcaatagcagtagacatatgctg

SEQ ID NO: 123 - DNA, 100 bp, Homo sapiens
acgccaagctggagagaccgtgcctccccgaggccggccgccccgcgagcacagcctccgcccccgttgcactgccgggctgggcaatatgaaggagcag

SEQ ID NO: 124 - DNA, 98 bp, Homo sapiens
cctcatgtgccggcaccgggcatccgagcatggcggggtatggcaggatggccccctttgaactcgctagcggacccgtgaagcgcttgagaactgag

SEQ ID NO: 125 - DNA, 41 bp, Homo sapiens
tgtggagccacatcctgttagatttgaagcctgagtctgaa

SEQ ID NO: 126 - DNA, 98 bp, Homo sapiens
agctttgggaacttggtgaagatggaggaagggggcagtttacttagctactgggaaatcacttgaggctcaggctttgagaaagttggagtgcaggg

SEQ ID NO: 127 - DNA, 55 bp, Homo sapiens
ttgctgttccatagccctctcccagcctttagggagtttagccaatagtttttgc

SEQ ID NO: 128 - DNA, 89 bp, Homo sapiens
tgggtgtttttctctgtttagttccttgacttagcaagatttggtgcagttaaagagttttcatgtatttttaaggagagccacagtgt

SEQ ID NO: 129 - DNA, 73 bp, Homo sapiens
tcaaagcaatacacggtgaaacagaaatcattttttccagttctatctactgtagacagtatcaattccttcc

SEQ ID NO: 130 - DNA, 60 bp, Homo sapiens
tagaacaaaggggaaattttgtaagaattaagagaagagaagctggaactggttagggag

SEQ ID NO: 131 - DNA, 92 bp, Homo sapiens
tcgtcagagaagcaaatggtctataagttatttaattttattcttaatatggtcaaagataatggttgcactgacttcaactttactttctt

SEQ ID NO: 132 - DNA, 66 bp, Homo sapiens
aattccattaattgcatagcactagaattttccatataaaataaaatcagatcccatgtcacacag

SEQ ID NO: 133 - DNA, 110 bp, Homo sapiens
tagcttcctgaatggcctgtgttctctaagtgaacttcttcagaatgaatccctgttcattccttgaaattcttttttctttctaactaccctaaaaactgttccaggta

SEQ ID NO: 134 - DNA, 32 bp, Homo sapiens
ctattaagtttctggaccccgaggttatacct

SEQ ID NO: 135 - DNA, 33 bp, Homo sapiens
ccacacccaggccagtattactgtttgaatctc

SEQ ID NO: 136 - DNA, 91 bp, Homo sapiens
tttggaaataaatattcttatctgatagaaaacaagcatacttactgattattcactcacaaatatttgctgagtgcctgtaaatgtcagg

SEQ ID NO: 137 - DNA, 113 bp, Homo sapiens
ttatcactcatatgtgttgcttgtaatgcaagtaatgagattaaaaattgtacataagaaattacctttctgagactctgttcatagcctgtttaaaagggcctagtcttttc

SEQ ID NO: 138 - DNA, 101 bp, Homo sapiens
ggaaatcttttgtgtgttttttcttttctttttctctttttttgggacagagtttcgctcttattgcccaggctggagtgcagtggcacaatttcggctca

SEQ ID NO: 139 - DNA, 46 bp, Homo sapiens
ttcaaaatcaatttaaggggtcacaattaatactttaaaattaaat

SEQ ID NO: 140 - DNA, 88 bp, Homo sapiens
aaatagaaaacatcagagtgaatcatacatagtaaggataaatgttatttcatgttaaattatgtttcaattctctgtattggctcga

SEQ ID NO: 141 - DNA, 101 bp, Homo sapiens
tcgtattactggtggggttcaacaagtatttgttgagaagtgatgaatcaagctaaagtttaagtaggcaaagatgaatcacgtcataacctctggtttcc

SEQ ID NO: 142 - DNA, 33 bp, Homo sapiens
aactttgtctatagaaaaggctccttgctaggt

SEQ ID NO: 143 - DNA, 62 bp, Homo sapiens
agcatttggtccattcaaggattaagaggaacagggatctgccagccttgtttctgcagaaa

SEQ ID NO: 144 - DNA, 88 bp, Homo sapiens
aaatgggggaggcagagctggatctaaccaaacaggttaaatttaagtgccaggtttccgtgaaggagaattatgccagcaatggttt

SEQ ID NO: 145 - DNA, 83 bp, Homo sapiens
ctgacagaaggcagacatggcactaaagagggagaatgagcaaccacagagctgatttaatttccagtggggtttatggaagc

SEQ ID NO: 146 - DNA, 85 bp, Homo sapiens
ccaaaacatgatgtagccaaatgttcctaaaagtatgaagtaatttaatttgttccatcattacaagaaattaaagccaagcaca

SEQ ID NO: 147 - DNA, 500 bp, Homo sapiens
attaagattttgattgaaattgcattaagttgcttataagcagtttataagtactacagagctccttatgatatccctgccaactacttaagaaactcctagttcttaaattacaaatattcccagtcaagaaaggatcaccagacatttgaaaaaagacaaaaaaccaaaccaaacaaaaaaaccagtagcctaaacaaaaaggaactaataaataaacaggacaaatttattttcctgagacaatttatcttctgctttccagaagaaacagagacaatgaaaagtgtgggaaaaatttgtcaatattaaattttcagagatattcagggggagaatataaccattaagtatgatctgatttccataaatagcagaatactgaatatatatgtatatataaagattggataaaatgcaattcaagtaatattcattcttgaatattgaattaagcaaatatcttagaatatagagcaaaaagccaaggatataaaata

SEQ ID NO: 148 - DNA, 500 bp, Homo sapiens
gatggaaaagtaaaaaagatatgaagaatgtggtagaagtggaggaatgggaaaggatgtgggaaaataacagaaaaaaaatccttgacctgaagagtaattcaagtcctcagattgaaaagtttcatccaacaccgaacaaggaaaaaaggatacatatctagatgtgtatacacatgctgatgaaaattttggaattctaagtataagaaattaatccttccagagaacaaaaaaaaaggatctttcaaaggtatcaaacttctcatcagcaagattagaagtgaatgcagactaggcaaggtttcaaagttctcaggaagaagaactagaacccaaaattgatagtcaaactatcaagtgttaagacaaactaaagatgtatttaaacatggaaggactcaagtttacaactttacctcctacagattcttcctaattaaaaggaagtattactcgaagatatattcaagcaaaacaaagcaacgggaatcctatac

SEQ ID NO: 149 - DNA, 500 bp, Homo sapiens
gctgatcttgtttcctttattatttgtgcctttgtgggtgggtgtgttgtgtttttattcctttactttcacttcagtgaagtatcagtaaaagagaaagaagataagcaggcatgatttcaccctctcttactggaaatccaggggaacgatagctgaggaggaaagtagcttggaagagcaccttagagtagaaaaagacgggagaaggtgagtttacaaaagtacagcaagatgatgatgatgataaataaaactcaatgcgtgctcactatgtatttgcactgtgcaaagttctttacatggattatttatttgtgtttttgtaagaacacctcaggaagtagctattgagacacagagaagtaatatgacttgtttaggttagtaaatggtagaggtggtattcaaattcagatctgatttcagagaccatcctctcaactgccacactatcttgcctcctacaaattgcttaagcagggatttaaaatgaaacc

SEQ ID NO: 150 - DNA, 500 bp, Homo sapiens
tacttttacaaaaatcatttttcatgtccattatttaggagtctctctactctatcaaaagtattaattgacctatttattaatatcttagtaatgtaaaatgcttttaggtttgcaaattagtaagagaaacttcttcagattaatagatgctgtctttatgaggactgcatgagacttatgtactcatcattatatacacccacagacgatctatttgaattctgtactcttactcttttgttaaataaatgtactctttctaactatgttttaaatcatctgcaaagagatggaagctgtgtgtatacaacagcaaacatctggaagaaaagaatattcagccaaagcttgttaaagagattcataagcaaagtatgcctttgaattatgaaaatgaattcatgtccaacatcataaagaactctgacatgtctgtttatgtttcaaacatggcttagagatcactgagattaaaattcaattaagtgtgctctgtt

SEQ ID NO: 151 - DNA, 500 bp, Homo sapiens
tgcaggccaatgatcatatatttggcttagcttttcactagaaaaattctttaaagaaatattgtccttccaattttagtggtactgaggaacagctctggttataaggggggaaatactatatgtcctttgttcaatcttactaatctttattaattttatgattttccccatttattttttaaaaatcattaataaaattatccttgattgagtttctcctatgtgctaggcattgtgataggactttagtaaacatcatctctaaccctttcaataaccctgcaaggtagggtcatattttatagataaggaaactgaggctcagagaagttatgtcttgaaattatatagtagcaagtggttaagccaggtttccaacacaggtttgtctgactctaaaaccagcatctgcccccatctcctcaccattcgcgaccagaatgtgatgcacgtctaccaaaaagagagtagcaaaaggtgatttatagaagcagtta

SEQ ID NO: 152 - DNA, 500 bp, Homo sapiens
  misc_feature 361: n = A,T,C or G
agtcctctgaagagaaggcaaaactattggggatagggaaaaagtaactataaagatcatatttatataatcgaatattaacttaatggcttgaattaggtggcaaataaaatatattagcaagcaatgttacaaaccatggtgagagctatgtagtagatgaagcagaatgatggctgggctcagggagctcatacatttggaacccagataaatctttgctccttcttcccagagcccatcatcactttttaaaaacacgtctttgctgggctcagtggcttacatctgtaatctcagcactttgggaggcaaggcaggaggattacttgagcccaggagtttgagaccagcctgggcnacatagggagatgctgtctctacaaaaaataacaaagaacaaaaccatctgaatttcatgcattccaacatatattattttgttccattctacttaataacctttacactagttgtgaaactcactgaaaacaaaggag

SEQ ID NO: 153 - DNA, 500 bp, Homo sapiens
gaatgaactcatttaccttcctttgatatttaggggctctattgcctgctaatttcatcactgttatttttcttacctcttatctttttccctgtagttattatcagcctaatattcattcattcattcatttacctgagttttcaggcttgtgcagagacaacagggtggggccaggttgcaagattgtgttcccaacttggaagtaacgtgggtaaggaaaaagtcacagctggccttagaagacacaagttaaccacatcccatgggtcagtggaagaaaacaagggaataattagaaaactgtgcaagatcagaagggagcccctgaagctataactgcaagaacctccagaccctattgcctttaaatccccttttaaaaggcaccaagtgaggaaaattccaagatgaatgggttacgggtctgaccttcaggaacatgtaggctgcctgccgatgtccacaacatcgtccctttcacatgcctaatacattag

SEQ ID NO: 154 - DNA, 500 bp, Homo sapiens
gtgggccactcatttaaaatttaaaaaatttcatttagcatttaaaaattcatttgacagaagagatgtttcaaataaatagtcttcaaaaaaagcccggtctataagtctctgtaacacagcccatctgctttaggtgaagtgaggcagtaggcctggagcctcacctggttggctcttaaccacatttactttccaggagaagcctttcaccaacttcctcagaacctccaaaacaccaaggaacaagatcctgaaattgtccatagtcttaactttgttaataacagactgcatgcccctggaaaaactatttcacttctcttggcctcatcaacaaaacaaatgtggcctaaaatactttgtaagatggtttcagttgtaaacagcctgaaaactcttagtacaactaatttgggcaagtaggtttggctacagataaagaacagaaagacttagacagtggtatacattactctgaaatatttttattatgtaag

SEQ ID NO: 155 - DNA, 500 bp, Homo sapiens
taacaacaatcagcttctggatggttcccccccccccccccattaaaccctattaaagggaatacggtctctaaaagggaaatccagagacctgtgtattcgagttataaccctgggtcaagcaacttaactaggctgatattttggcttgatgtgatttatatgtaaccttttaagcaatgtatattaaatccgtactttttactcatctacttgattgcaagctcctgcaagataaactttgttgaactcaaatgttgtaaacttcatggggcttagatataaactacagacttcatcagtgtttaacaaatacttgcttaagaaacacaaagtcctgttatatcagccaattaactatgaagctaattttaataactgaaatatcatagaggttaatattcaaaacaccactcatcttttttctcattgagtattatttatttatttttgctttctggagacatacgtttaccctttatttactgtctcattttgtc

SEQ ID NO: 156 - DNA, 500 bp, Homo sapiens
tctctgaacataccatttacagctttttagttattctggaaaaatcactttgtatgaaataataggctatgatggctagaaaggatctcactgatcatcagtgcaaggattgattttagaaacaaggaaagtgaaaccagagacagccagtgactagtctcagtactcagagaggtcatggttggtcagaggtcagaactcacatctcctgacccacagcacgtttggctttgtgcacaactgactgccttagttaaggacagataattcttttctctttaacaatagaaaattagactaattaaagtcataaaagatgttgctcctttataagccatagagaaacccccgatggtttctttatttggatctgtgatctttaaagcatgtgactagcagctataattggattaaagtgaaaacatgtgattgtgaaggagttaaagtacctttgccttattctgctttgatagccagcttcaattgcacatcgtgacaag

SEQ ID NO: 157 - DNA, 500 bp, Homo sapiens
ttttgaggctgccaccaccacactataacatattcctccccgctctaaggctctgaatttggacctcccacatgacaggactctaaataatgactaatccattaagtttctgctccatttccaaaatattcattcaaatttgaaatgcctggggcctcttgtgtagccatggctgggctaatttctgcatttgcattttaaacaccctgaatcaggattacacctgaagactttcaaataagtgcttagatggcacaataaagatattcaggttaaaaaaaaatctaatgagtctgttgttcctttgcaaggcctagtgataggaacctcttcttggaaatatttgttaagccattctcacttgtagtcactcttggtaccaaatctgttgaccgaaaaaaaaaaaaaaaaaaaaaaaactcgaggagagagggagaaaggcaaagttactctaatgttttaactaacccatataaccacggagaaccagccctaggaac

SEQ ID NO: 158 - DNA, 500 bp, Homo sapiens
aacactaaaatcttaaggactgttttttcagactctgaaaattctcctaaatctccattccagtatcattcaagctctttacaaccgctgtttgtccttaggctgtaacttgtgcctgaaatcccactctaaggttcccttgtggtatttttaatagtgtttgatgctgcagccagcttctctgcggtttgggagttaaatgggatacagcaatgtggtgtgctgtaatggctcttggagaaatgttagggcaaattaaattccaaataggatagcacctgaaagaacctggtcctttagtgaaagagcgtaggaaggaaggcttagagagtcttactggctcctaagtgattaagaagaaacatctaacctgagtttgaaattcattttggactcaaatacagagtatttactttaagacactggtccttaaccacctggttcttccctgtttgcttttctgcttagttaagcccaaagatgggtgttagtttaagaga

SEQ ID NO: 159 - DNA, 500 bp, Homo sapiens
caaagagttaaaagaaaattctggcactcctatctagtcatcctctccagttggcagaagtcttcatgtggacttgatggttgcccagagcaacaaaatattagggacagaaacatgttcagggactcgattgtataagtgactcagagctgagagaccttttccagcttgactgcagcccatacttagctaaagtgggtatttgtctattcctgtctgcatactgtgacttggagatgcctattattttgcttgctaaaatatggaagccaaccttgaaactggcagagaagagttaaatgatcagaaggcaatcgtcttcattcagcacgtctgacacatgaaagatcattaggactagcaaatataaacaagatcagggagtggtcttgggctttgaagagcacataccaagaacatcaagagaactcaatataaattcaatataaaagctactattcaaggccaattatctcttttgagttagaagagcccaatgg

SEQ ID NO: 160 - DNA, 500 bp, Homo sapiens
gagccactcacgcaaatcaataccctttccttctctcagttggagccagacatctctaactatcctctgaattaaactggatttttaaaatgtttttctgtccctaaactctttaaatcctgaggtcatcctttctttgttccatcagtctggctccatgataccaattactccagcttgttaaagcagttattggcatatggtagtcatgtcttttgtttctatgcaatgtttcctggagcaagaattggagggagaagtattagccaagtcttgttgctttaagtctcctctcttcaactgtttaactaggttccatcctaattatgtgtttggttggttttattttgatacccaatatacattcttctcatttgtacatgaacaatgtcattatggtaataataacaattatacaatattactttctgtcctcattgaatgtcattatgatcaggagctggtcctcttggtttggacattataatttgaaatgaata

SEQ ID NO: 161 - DNA, 500 bp, Homo sapiens
gttttaagaccaggggtataatcccagctctgcctagctctctgtgtaatttttggtcagtaatttaacctgggttgtgttctgtaaaatgatgatattggattaaatagtacctaatcatctaactttttcctaatattttattattataaaaaaatgcatgcctctgatgaattgcctttatcttctttagtcatatttccctaagaagtgaataaaagataccaaggcaatgtgtgaattccactttttccaatctggatgtttaggggatatccttgacaccatttgctattttgagttttcaacaaagagttaaaagaaaattctggcactcctatctagtcatcctctccagttggcagaagtcttcatgtggacttgatggttgcccagagcaacaaaatattagggacagaaacatgttcagggactcgattgtataagtgactcagagctgagagaccttttccagcttgactgcagcccatacttagcta

SEQ ID NO: 162 - DNA, 500 bp, Homo sapiens
agtgggtatttgtctattcctgtctgcatactgtgacttggagatgcctattattttgcttgctaaaatatggaagccaaccttgaaactggcagagaagagttaaatgatcagaaggcaatcgtcttcattcagcacgtctgacacatgaaagatcattaggactagcaaatataaacaagatcagggagtggtcttgggctttgaagagcacataccaagaacatcaagagaactcaatataaattcaatataaaagctactattcaaggccaattatctcttttgagttagaagagcccaatggagagccactcacgcaaatcaataccctttccttctctcagttggagccagacatctctaactatcctctgaattaaactggatttttaaaatgtttttctgtccctaaactctttaaatcctgaggtcatcctttctttgttccatcagtctggctccatgataccaattactccagcttgttaaagcagtta

SEQ ID NO: 163 - DNA, 500 bp, Homo sapiens
ttctaaagcacaagcagtttctaagaattaataagggggaaaaacaataatgatatttaattgggacaattatttttttgttatctgggctaatcacttaatgctttgagcttatcgaatgaaagaaactaagcaactatttcatggtgacaataaggatgctggctacttacttagatctgccttttaaatctgtgtgtgtgtgataaaagcaagtagtatatatagttttttaaaaagaaatatagagagatctaatagatgggagcaagaaccatataaagaaggcaaaagggatctacatgagagaaatatgtaagtcctcaggagatactgaagtaaaacatgtgttgtgtcagtgtatagggaagacaagagacccagccattgccagagaagccctacttcctcatcaaccaccagcaggcagcagcttcatgctgtagttctttttttcctttaatagaataaagattgtggccacactttaataattgcca

SEQ ID NO: 164 - DNA, 500 bp, Homo sapiens
aaatatgtgttcattaagctttttaagaaatgtgatcgaaaaatgctgatgatacattgtgtttaatagctttaataaaaaactgataaagcatctaatacatctaatgactgtcggatttcctaaatcttttaagctgaaggagtttacttttacaaaaatcctcattgaaaaagaatcttccggtaaaaacattgaactgaaagatttgcataaatgcatggagtattactatttattagttaaacttatgatcttttagagcagtaaaagtcagttctctttcttacaaatgaatttgttttggccttttatgcttttatttaatgagtagagccatacctattaatatataaaaagatcagatctgacaccgtggctttttgaccaggaattgattgaagttagacttgttttaagaatagtgaaaacaagggctatgtcctaattatgaggggaaataatttaattgtgtctctcttgtctgaatatctgatttg

SEQ ID NO: 165 - DNA, 500 bp, Homo sapiens
acacatgatgcagtgacaagcatagaacagcacagaagtggttttagtccagaaaataaataaataagtaaattggtctaagtcttcattcctttttgtatttttttaccctgaagattcatggcttcattaaaaacagtaagtgcattctaaatagaatttagtcaattggcacgtagaaaattaaaaagtaaactatccaaataatgctagtctgtcaaaacacaatgagaagaaatttaatcttatatgtttgttgttctaaagcacaagcagtttctaagaattaataagggggaaaaacaataatgatatttaattgggacaattatttttttgttatctgggctaatcacttaatgctttgagcttatcgaatgaaagaaactaagcaactatttcatggtgacaataaggatgctggctacttacttagatctgccttttaaatctgtgtgtgtgtgataaaagcaagtagtatatatagttttttaaaaaga

SEQ ID NO: 166 - DNA, 500 bp, Homo sapiens
atatagagagatctaatagatgggagcaagaaccatataaagaaggcaaaagggatctacatgagagaaatatgtaagtcctcaggagatactgaagtaaaacatgtgttgtgtcagtgtatagggaagacaagagacccagccattgccagagaagccctacttcctcatcaaccaccagcaggcagcagcttcatgctgtagttctttttttcctttaatagaataaagattgtggccacactttaataattgccagaaatatgtgttcattaagctttttaagaaatgtgatcgaaaaatgctgatgatacattgtgtttaatagctttaataaaaaactgataaagcatctaatacatctaatgactgtcggatttcctaaatcttttaagctgaaggagtttacttttacaaaaatcctcattgaaaaagaatcttccggtaaaaacattgaactgaaagatttgcataaatgcatggagtattactatttatta

SEQ ID NO: 167 - DNA, 500 bp, Homo sapiens
aaacagtattatctggcagactctaagtaaaggccactgtggtcttccttttggtcaatgcaaatttgtgcctccattactgattcaaaccaaatcggcttctttgggtatcagaatagtaggattcaatctattcacggctaaactcgattctgttcagtgagaacaaagtgctgtaactctgcctcatcacatgatgaccctgggagaatcagaacctttcctgctgggcactcacagagccactagaacatttccaagctcatccttggattttatggaaggcatgtgctcctttgcacaagccaccctttttatttgctgcagaaaaggagtctaggaagaatgcattccaaacccagcccctgggtgggtattcagatgcacattgctgacttgttaacacattactgcttcttgtcaccttgggttttttgtttttgttttgcccttgagattttttattccagaagtgagttctggctcatctgtcattagag

SEQ ID NO: 168 - DNA, 500 bp, Homo sapiens
aggtatcgaggcaaccatggatcaaagtattaatattttctgcttgccattacttgttcagatatcaagttcctgagtaccagttaattgtaggattgatagtaaaaggagataattagaattgagtcaaccatttggttttccaaaactgtagaagagtgtgaaaatatttatttaataccattcccagacaaaatcaatggtttctaaattttcacagagcaaggactaaaaaggagtaatcaggatatcaattatttgaatgataaactcttagccagaaggtaacagataacaccctgttacacacagcaagaccccatctctaaaaaaaaaaaaattaattagccaagcatggtggcatgcacctgtagtcccagctacttgagaggctgaggtggtggggggaatcactagagctcaggagttctaggctgtagtgagctatgatcacaccactgcactccagcctgagcaacagagtgagaccctatctcaaa

SEQ ID NO: 169 - DNA, 500 bp, Homo sapiens
cctatgttagcacgtagctctctgtgctcctgttgcctgtttgtctgttgggatgctcctgaacactgtcagttcccagtgagtaggaatgtagtcggttcacatttgtattccctgtgcctagcataatgcagagtctatcagtctgcaaaggcctgttcgctgaaagggcaaagtagtaactcagcatgtaaaatctgagggcatgctttgaggtacctgttcattaccaatcacgttttctatgtaacgtggccgtgcaatgtcatactgacctcagcggcccccttgggctttggggatttggtagcttgtaaggtcaatcacctcccccttagaaagtctcagctctgcagaagaaatgaagttaactggttgtcactcccaaactttttagtctcgaattttacccaggaaactgagatttttgtctttaaaaagtgaacaagaaactccctttatgcttcctttacatgtggtcacctgggtaccagcattta

SEQ ID NO: 170 - DNA, 500 bp, Homo sapiens
atctgtggcaggtaaatagttgatcagtcaggctccagagacgatctgaggcctgtttctatgcaagacagaagttttcagctgacatacagggatggaacagattgaaatggaaaggaggagctagaagaaaacagaaaatcatagcttgagcctgaacttcctctctgccttgtcaatgcccagggtgacatctaaccaaacagtattatctggcagactctaagtaaaggccactgtggtcttccttttggtcaatgcaaatttgtgcctccattactgattcaaaccaaatcggcttctttgggtatcagaatagtaggattcaatctattcacggctaaactcgattctgttcagtgagaacaaagtgctgtaactctgcctcatcacatgatgaccctgggagaatcagaacctttcctgctgggcactcacagagccactagaacatttccaagctcatccttggattttatggaaggcatgtgctcctttgc

SEQ ID NO: 171 - DNA, 500 bp, Homo sapiens
aggaatcccactggagtgcacgcggcaactgacctttttttcttggccagagttcttgggggccaaggagcactaaggaggcacaatgctgataaactgtaggaaactcttctctgctgtcagctgcctccgggctcagtgatcccaggatttgtgacacaactaccctgtagtaaaactctaagttgactagaattttcatgtggaagtgtgtaatgttaaatgaagtagactctgatgaaagaaagagaaaacaggaaaacccaagcattatgctggatccctggagaaaccctcacttcattcagactaaggagatatccctgatttgaaaatacagaggcgggagaataacttgaacccaggaggcagaggttgcagtgagccgagatcgcgccattgcactccatcctgggcaacaagagcaaaactccgtctcaaaaaaaaaaaaacaaaaaaaacaaaaaaaaaaacggggtaggaacaactacatctcttta

SEQ ID NO: 172 - DNA, 500 bp, Homo sapiens
ctttactctaaccaaaatacagcacctgggatacttctaggataaaaatgcagtagttattaatactatagaatattaccatttagttggtaataaaatataaccaatattctcatattcctgcctgtccctcagccacttcacccagcagcaacgatcttgtggcctcatcaccatcctcaagcttgcagactgtgctaggccctccctgccaggctatgaaagaagatagtcacctcgtttcagtcggtgctaaatttttagcttttctttagccttaattaatttaaattacaactactatcttctggacatctaagttctttttaagagcgaaccatataaaattgtctatcaaccttttctggtgtacaaaccagcaatttcatagggtttaaacaaaacataacctggaaagaggttttcttttcataaaaatgacctttctattttgtaaataagcataacttgactccagctttttccggaggtaaaaccga

SEQ ID NO: 173 - DNA, 500 bp, Homo sapiens
gatggttaatatcttgtttgctgaaggttttgctggagattatgaattctttctagtacctgtatttctgtgtccaaaaaatttacacttgtatgatttaataatatgatgtgatagcaaaatcttataaagctgagggtttttaattgattactattgaaaacttatggccgggtgcggtggctcgtacctgtaatcccagcactttgggaagctgaggtgggtggatcacctgaggtcaggagttcgagaccagcctggccaacttgatgaaaccctgtctctactaaaaatacaaaaaaattagccaggcatggtgacgggtgcctgtaatcccagctacttgggaggctgaggcaggataattgcttgaacccgggaggtggaggttgcagtgagccaagatcatgccactgcactccagcctgggtgacagagcaagactctgtcaagaaaaaaaaaggaaagaaagaaaacttataattctatatctaagacct

SEQ ID NO: 174 - DNA, 500 bp, Homo sapiens
agagagaggtgaacagacaaaatatggcataacaatgtaagtaacatcatcaaacatagaaccaatcattccaatttgagttcattcaagtagctattcttgtttctaaccaaatgatctaggtattattataagaaaaaatatatataaatatttaataacaaatgaaaaaaggtctgtgtatgatatatggtcttttacatcaagtaatatttattaagctgcaacaaatagattagtaaattggacttgaaccctgccatcagtgctcttaaattccaaggaaatctagtcttttacctgattagatattttctgtagtgtacctataatctccaaggaaaaaaaactaatggaatttcaagatattgggaaatacacacatatatgtaatttagtccatgttagtaagctatttaaataaaaaagatgtgtacttaatatacttgaaattagaacttggaatataaatcagctgtataatttataggcatatctga

SEQ ID NO: 175 - DNA, 500 bp, Homo sapiens
ccttccacagcaccccttactaatatctacagtaagaggccaaaagtaaaactcaggccccactgctggaacaccatttctactattgcatatcctgtgtgcctaaaaagcaacagtgaccctggctgatgatcaagaagcccctctttttacccagggagttggacaattgttaacatcccagaagacatatttttaacccagttgctgggaagaacatgtgctgaagtataaggatggaatcactgtaattctctatgggaactcatgaaagtggaacttgccgtttaatattgaacgacactgagcacagagttattgatgatttctaatgcgggatttggtttatttttcagacacggagatgacttgattgtgactccatttgctcaggtaagcacagcttggtgaatgggcaggtttctcacagatgtaaaaatttaatttggggaattagttcgggttattaatttaatttaattttaaatcaagcacaagta

SEQ ID NO: 176 - DNA, 500 bp, Homo sapiens
aaatacaaattcttggttcattcaagcaattcaaaagcaatgctagagaaagtgactttggctatattaatctgtttcctataaacccatagtaccaaagagtgtctttgcttcaaataataaattagctaagggatatacttaattgggctcatactgacataagcactagaagcagaaggctatatcatggcttaagttatgtttagtataattaggtacatgatcagtgcttgaaattcaatattccaattcaacccaataccttatttatctcttttttacatatgccatttgtgcagagatttagctgagtgatgtgttgatgtttacttcttccttctaggcatacaaatcatgaaaatactttaaccacatgacatatgtgcaagcaggtgataacatgatctaaaatgtttgggaatataaatatgaaagagttgatgaccagatgttctatgtatagaccaatacttctcaaccctacctgcacgttagat

SEQ ID NO: 177 - DNA, 107 bp, Homo sapiens
aaggcattcattggcatcatgtattttctctaatgagtcctaaattgttttctcatgacaaataaagagattccattttagactagattattttttgcttatgttgc

SEQ ID NO: 178 - DNA, 49 bp, Homo sapiens
taaacttcagtcccatctgctttatcatcagtgcctgtcctccacaagt

SEQ ID NO: 179 - DNA, 300 bp, Homo sapiens
taaaattgttgcactagttgaccaaaaatcttttccctaggatcccattctggtgaaaaaccaaaagggcagggccactggcattaagaacaagcctgccaataagataaactgtgaaagaagatcccgttcctagaacacaaagtgagagcacttgtgaatccctgcccatgtactcaactctttcgctgtctttcttccctccatggaagtcagactctcagctttgtactcaaaccttctggtgataatttgggacatcagccgtcctagaaaagtctctctattgtattggttttt

SEQ ID NO: 180 - DNA, 300 bp, Homo sapiens
ttaaacaaaataacctaatatgcttagtgaatatgtctacacacatgtgctaaacatttgtttaattatttaacttggaaaattttggtgtatcatttctaacagagatagtctttgtgccatcatataactaacaaatttgaaggcattcattggcatcatgtattttctctaatgagtcctaaattgttttctcatgacaaataaagagattccattttagactagattattttttgcttatgttgcgtaaacttcagtcccatctgctttatcatcagtgcctgtcctccacaagtg

SEQ ID NO: 181 - DNA, 69 bp, Homo sapiens
tgcactgctacagtgagatggtgccagcacctctaagtatcattgccagtgctctaacctttaaaataa

SEQ ID NO: 182 - DNA, 50 bp, Homo sapiens
gaattaattgagttatatgtagtaatatatcttggctattactgccaaag

SEQ ID NO: 183 - DNA, 300 bp, Homo sapiens
tttcactcatttttacaaactatggttgctattttagcagttgtattattgacgtctacccttcttcatctctaaacaactttctattcctagtggccctatttttacattatttttatctcacttccttagatttgaaattcatgacacttacttattcattcacacataatgagaatgcttcttgagcaaatatggtgtatttaaagctctgaatctgtggagcagtgaggtctggcattttagaccattgtaataaaatatggtgagcacaatccttgaggcatttatcatgtactg

SEQ ID NO: 184 - DNA, 300 bp, Homo sapiens
aggaacagagagaggagatggagagttttccacccaagggaaagatacagaaaataccgggctaagggaacaacatttactaaatgtgaggcatggaaaattatggctgaactaaggaatgacaatctgcttgatgtgaatagcgaaacctggcaagagagaagaaaatttcaaatacagtctatgggacctgagagccacagaggtttttagctgagttttggcatgatcatattcttgtttttattgcatcttgattactctattgttgaatgattgcatagcgaagtcactacaggg

SEQ ID NO: 185 - DNA, 300 bp, Homo sapiens
tttacagttttgatgtggacaatggcacatctgcgggacggagtcccttggatcccatgaccagcccaggatccgggctaattctccaagcaaattttgtccacagtcaacgacgggagtccttcctgtatcgatccgacagcgattatgacctctctccaaagtctatgtcccggaactcctccattgccagtgatatgtaagtacaagggcaggcaaagagagagaaaaccgagtaaatttatatctagagctgatgacataataaaactaatgacttttgttcaactgtatcactct

SEQ ID NO: 186 - DNA, 300 bp, Homo sapiens
ctccaatgtagaaagaatatgaataaaattatacaagctagaaatgaatggtagatttaacctgagtgcactgtcactcttgattaacacacacacacacacacacacacacacacacacacgcatgtatttattttcccagaaaatactttataggaaaactgagaattaaatttttaatggaaactaacacttaaatcattagcttatatttatgtagagcctgagttttagctacctaactacatggatattttctaatattttgaaaagctttcaactccattgaaaagtcctgtg

SEQ ID NO: 187 - DNA, 95 bp, Homo sapiens
tgaaatttgatggagacctgaatttaaaatattggtagtagggatggaaggaagtgggtacaatagaaattaatgcttggatggatgttataggg

SEQ ID NO: 188 - DNA, 56 bp, Homo sapiens
aggagtgtggagggagaagcccaggtttgggagaacagcattaggcacaaaatggg

SEQ ID NO: 189 - DNA, 33 bp, Homo sapiens
gagagtttgccaaagatccctaatgtatgtcta

SEQ ID NO: 190 - DNA, 87 bp, Homo sapiens
tgaatgattagagaccatcctccccttccagccttcctgggaattgacaaggtttcacatacatatgtgcctatcctattctggtga

SEQ ID NO: 191 - DNA, 59 bp, Homo sapiens
cagatgccacctgttttgctgcttttattttctctggttgcttgatgttctattacctt

SEQ ID NO: 192 - DNA, 82 bp, Homo sapiens
actagactttagtgctttctagaaaaggacaatgtgtagtatatctgtacttattcaagtgctgatctaaggacataggatg

SEQ ID NO: 193 - DNA, 51 bp, Homo sapiens
ctttgcatgcgtcacctgtaagttaatcagaatgttactttcaaaagttcc

SEQ ID NO: 194 - DNA, 97 bp, Homo sapiens
tgcaggtgaggaagctaaaaggtattcttgtatttttttaaatgaaacttcataatagaggtgtaaacagagtccattctccccagccttagaatca

SEQ ID NO: 195 - DNA, 118 bp, Homo sapiens
agacccactgacccttccttaattccaaatgaaatctcaaatgctataaagaaacccgccaaatgggttacagcaaagacttttttacaccctactgttatgttcagaattggaaaaa

SEQ ID NO: 196 - DNA, 34 bp, Homo sapiens
ctggggatttggcaaattccaaaatgttgggtca

SEQ ID NO: 197 - DNA, 128 bp, Homo sapiens
tgagagcgtggatgaaaggtagattggaactgtattaccatccagtaattccactgaaatggaacagtgtggagaactgggagtaattagttcattcgtcagtttgtccgacttctctttgtttcttg

SEQ ID NO: 198 - DNA, 37 bp, Homo sapiens
agggggctggttccatagaaaaggatgggtctgtgga

SEQ ID NO: 199 - DNA, 143 bp, Homo sapiens
ttctcaatcacagtgacacctgcatgaaattgccagagaaattaaggcctcccaatgactaccaaaaaaaaagacactttccgcttcccattgtcagcacgtattctgattgaatgtatatgtttactacttgaagttctcat

SEQ ID NO: 200 - DNA, 151 bp, Homo sapiens
atttctaggtaattactgcaaatatggacctcatactgctactgcaggctttgcctcaagagtccaaataccatggcctcatgttagggccatttgagatcctttttgaaaaagttgctttattgtgctaaaaacaaagacacataatatg

SEQ ID NO: 201 - DNA, 101 bp, Homo sapiens
cccatctgtttggattgttgaggttggaaactgaataatatcacttctccaaaatagatttaatagtagggctggtgaatggtttcctgacctgtttgatg

SEQ ID NO: 202 - DNA, 37 bp, Homo sapiens
agagtgcaaacccagaggaaaaaaaaaaaaaaaaaaa

SEQ ID NO: 203 - DNA, 300 bp, Homo sapiens
ttaagcacttaggtaatgagaaatgtcataatgaaaatatctgttaaccgaggaagatcaagggaacaaaacaaaaaacctaaatgaagtgtgaaggtggtagaagtaaagacatagatggtttcacttgggccagagatagattgaatgtgagacatttgaaagtctaatgtactttcagtacgtactttccagtttactttgatggaacgcactgtgttgaatgttattgtgctgacaaataagcccccaaattaaatgacttaaaaaataaactcattcttcatcaagtagcgttct

SEQ ID NO: 204 - DNA, 300 bp, Homo sapiens
ggatggtgtttaggaggatgtggcagctctccttgctctcagtcacggaccaggattctcccaccttctgtttctaccatccttcacgcatcagcatctttagcatccagctggcagaaaaagaacatcaagataggcatgtgggaggagctatgagccagtcctgaaagtggcatgcaatatttctgctcacatctagtcacttggccaaatctaattgcaagggaacgagaacttcttttatgcccaggaacaggcagagaatggaatatggcagacaacaagcagaatttcctatac

SEQ ID NO: 205 - DNA, 300 bp, Homo sapiens
tttatcttggctgtggacctggcaagtcaacaggatttatgaatagcctcaccatgaatttggtcatcctgaggggaaggaaaaccccaaattaattttggagcagaagatcagtgtaactactaccatccttacgtcttctcaatgagcttcattattcctcccagagtggctagagtaggtagttgatgagcatttgtggaatggataggtatctcttttctatgacctactctatcaccctcaggatctattaatcctttgagtttgatctctaaggtggcaatgaaatatttctta

SEQ ID NO: 206 - DNA, 300 bp, Homo sapiens
accagaaatacactgaaactcagagaaagagggctcaaatttgaggagagtgctatactggcaagaggatgccccaggtaatatcctttccttcttctagagaggaacatttggctctagaaaggcatttagcctatgagttcagaacaggaatggtcttaggcatctgattcaacctacgacattgccagtctgaaccaactcatcctgatcccactgcaaatgagctaggcaacagtgaagagtggttctagtctgggtttggataaattgtgaaatatttctagaatttttctatag

SEQ ID NO: 207 - DNA, 300 bp, Homo sapiens
tatgttctctacttgggtgacaagataattagaagcccaaacctcagcttcctgcaatatagccatgtaacaaaactgtgcatggacccctggatctaaaatttaaaaatcaataaataatacaaaagaaatacattcatatttttctgaaatattcttcagaatatcaagtgggaatccctttgttttgcaaagctggtctgatatgtttaagtaaatttaaccagatagttgttttctgtatctccctctaagtattaacaaacatttaccatacactataaagcattacaatattgt

SEQ ID NO: 208 - DNA, 300 bp, Homo sapiens
aggatgattaacaagagtaccaaaatgaaggactcttgctaaaatccttttccagctttttcattctactatttacagacatgtaagcacatccattcatttcagcaaaatgtaacattccacacaaaggttttgaacattgtgctcggctagagaatatttctagtgagtgctcataagagacattaaaataagcatttgtctttcattcaagctttatgaaggattaaaagtaatccaattgttcaatccttcatttaaatctttagtccaaagaacagaagatttgggattgagtcg

SEQ ID NO: 209 - DNA, 771 bp, Homo sapiens
ctcccatgtttgctgttgcttaagcagtatttattttggtaacaagaatacctggccttgccacttaatctccaccattccaaagaaaacctttctgagatcatcttaacgttgtctctaggcaataaatatctctggtttctagttattcccaaggacactgacctcacatttcttactgtcttaaagtcaaaagtacctttgtccttaactcacaccaatatgtatgagactaggatatgagagagattgttacatcttgcttgatgttttgacattataggtagtgtaggttttgttattacagtttgacttttgaaatgcgtatgagatttctcaggtgaaatagagcctttgatgtggtactcaaaagggataactatgactcagaggaaccatttctaaaagatggcactctttctccttccagttctttctgttcaatagtagggctggggaaaggcagaggcagtttttgttatttcaaatgacagcatcaaagatagtaatccacggtgctcaacaaaagtcgaatgaccttttttccttctccattcataaatacataagagctgatgcttcattatgtttaaatacaaaatgcacactcctactttgttttcctatatgtgagttctcatgtattcttcaaatgctcatctaattactgttacctactattccaaatgcaaatgacaaggtcccagtttactgttgatcctatattacaagagtcatcaattttggttgagaaacacaaaggacaaatat

SEQ ID NO: 210 - DNA, 229 bp, Homo sapiens
tcattattgtgctaaccatgcctattattagttttgtgcccccataacataagtaatagccccaaatacatggcacttatcacacaccaggcataattctaaatggcatgttctccatgttatggaagaagagactgaggcatggagagagtgagtaacttggccaaactcacaaggctacaaaggcagagaatcaggttttgaactcagggctgcctagaccctgtgt

SEQ ID NO: 211 - DNA, 161 bp, Homo sapiens
gactaggatatgagagagattgttacatcttgcttgatgttttgacattataggtagtgtaggttttgttattacagtttgacttttgaaatgcgtatgagatttctcaggtgaaatagagcctttgatgtggtactcaaaagggataactatgactcaga

SEQ ID NO: 212 - DNA, 59 bp, Homo sapiens
gaaccatttctaaaagatggcactctttctccttccagttctttctgttcaatagtagg

SEQ ID NO: 213 - DNA, 152 bp, Homo sapiens
caagttacttctcttagcaccattgctttatccggcatagtaataaaaatcaaatgagacaatggatatgaaatgctaaaaatagtacattctctgttgttattatctattgtgattattgtgttacccttggaaaaaggcctgtagaatag

SEQ ID NO: 214 - DNA, 97 bp, Homo sapiens
ggcagctgggtcccctggacagtgaactaccaacctaaaaactgtctgggcaggcttgcctttgggagttcttgtatatcagctctaattctgtcca

SEQ ID NO: 215 - DNA, 195 bp, Homo sapiens
ctttctctcctctgacaaagtcactgtcacataaaataatggtcctagagtcaaaataataacagaactttgttctgatggagactgtaaatataccaatactcccattaaaaatataggtgggctgcctgaactgagaaggttgtgtcatggctgttagttttaataactggaaggcttgacagagataattgc

SEQ ID NO: 216 - DNA, 60 bp, Homo sapiens
ttagtgcttcactggcctcaagatgcatgcaatgagtaaaattaagaccatcttattaaa

SEQ ID NO: 217 - DNA, 662 bp, Homo sapiens
tatataatatatacatttatatataatatttatatgtatatttcatcacacaccaacatccacagacacacacacacacttgtttgactacttcctctattccttgaaacgcttttgagagacctgaaatatccttgtatggcaagaggggaatggaatcaagctgatttttccatttttacaatgtgcctgggattgtgctttgcagtttagtggcattttctgattcaacctcacagagccctgcatggtataatattgtctacatttaagatgagaaaagcaagatgtggagaggctaggaaatcttcccaaaggcacgaagctcctggcagaaccaggatttgaggccaagtatcaaggttacagtacagatagacatacatacactcaattataagtaaagtttttatgaggctgggtttgacagcaacatgataagtagaagtttttgatttggtaagatttttcgaaaactcagagagtttattgccaaatttatttttctcctagaaacatttttgttgttgttgttgctggcatggacagttataaaaataaattagaagtaaacagataacagtttcctggctgccttcatgtctgtgagcctaacacggctcccagaaggaaaaaatatgcctcaaggaggcttatatgat

SEQ ID NO: 218 - DNA, 338 bp, Homo sapiens
ttgcttatttagggaacctttgaccacttatttacaatatccagttacagctgtgctactttcctttttgggcaaaagcacatattcgcttgaccattattttggaggaagctgatattgcctgtcacttccaacatgtccttgtgtaccctagctcataattgcagcatttaagcttggagctcccctaacaacacaattattgccaaatttaccatcgttgggaacattggtgaggcctgcttcagaggcctctttgtcagcaagaagcatgttgcagatatgcttcaccttgcatcataaatgcatttctaaaagtagtttcctattgaattatt

SEQ ID NO: 219 - DNA, 300 bp, Homo sapiens
caatgattccaaattgttgaatagttggattgcatatttacttttcagtagtatgttggcatgcatgtagatccagccttcctttcaacaaagaacagtggtggaagattcccttaaatggttactctttcctcaataagagcaaccatataaaaattatagaactattagtcatcatagttgaaagtatcgcataagattaacagagtccccatctggtgatatgtttttacatcagatttattaagatcagagcgggttttaactagagcaatgacactgctattattaaataagaga

SEQ ID NO: 220 - DNA, 300 bp, Homo sapiens
ggaaggcctaatacataattgtctatttctttctagacatttatgtgtttttattaggataatgaatacagaattatcaacatcatgatcatagtttttttggtttttaagtagtatctgtaatggcaagctcatttttattttataacctacccacacacagacctacagtgaagcaaaacagatgctgaaatatgtttgttgccattggctttgaagaaacctcagagaggtttgcctcagtattttaaaagcaaaatggttggtacctttctgaatagatgtcattgtgtccttcaa

SEQ ID NO: 221 - DNA, 300 bp, Homo sapiens
ttttgcaagagttctttatgtattagatagatgaaccttctccagctcacatttattgtaattatatattccaatttttagtcccctttttacttttgttcatggtgttttatacagtcaaatttattgattttttttcttttgtaacttctttctttgctttaataatttgagggcttttatcttaagagtagataaatgtttagctacattttccgtatttgtgattttttaacctagctcttaatctgtttggaatttatcttaatataaggtagggatacaagtttattttttccc

SEQ ID NO: 222 - DNA, 300 bp, Homo sapiens
ctatacgtctcaggaccatttgttacatgtgccctactttgcttattgctttgtgtcacagataaaattttatgtatcatctatcatgtgtagacacctcagatataaattacattttacaaataacatctcaatagaaacaagtagaaaaaaaagaactctggtgcaacccattgagagaaacatactacattacaactataacaatgatgtaactaaatttctatttgccttctaaacctttttattgcttgtagccatttgctaactcctgaagaaacttttaccttttcttgtccc

SEQ ID NO: 223 - DNA, 300 bp, Homo sapiens
cttctttcacttagcataatgttttcaagtctcattcatgttgtagcatatatcagatttcattttttaggaccgaataatattccattatatgaatataccacattttgcttatttattcatcagttgatagacacttgcgttgtttcactttttggctattttgaaatgtgctgcaatgaacatttatgcaaaagattttgtgtgtgcatatattttcctttcttctgggtatattcctagtagtggaattgctgggacaaatggtagctctaagtttaaccttttggttattttcca

SEQ ID NO: 224 - DNA, 300 bp, Homo sapiens
tgtatctgcattctcatgtttcttacagcagaaagttattctcttgaatggctgcatcattattgatgtagtcaaggtgtatttttaagtggaaaagttaaggcacaatgttcccagttatggaaaaatatgctaagactgtacatacataaatatgtttcactcaaaagcatctttctgcgtatgcacttaaggtgatggtagaagttgctagctttgaggaagaggtggctacacgtttggaatctgaggtagaagggggctgagtactcaccattttaaacttggggaaattttact

SEQ ID NO: 225 - DNA, 300 bp, Homo sapiens
gaattgccaacaatatgtactggagagatgggggtggattctgaagtcaaatgaatttggaactcatcttcttttacatgctgggtgattttggacaagggggaaaagctacccatagggtttctgtgaatgttaagtgaaataatacatggaaagtgcttgaagtaatggtagggacacagcaaaccaaaaaaaatgctagccagtttattattagaagggaaaaactcctattaatattttcttgtttatgtttgtgttttcatgttagtcttaaaacaagttactgtttgagaatgt

SEQ ID NO: 226 - DNA, 300 bp, Homo sapiens
agaattttaaccatttacaaaatggtgtatgatatgacatgtatatgatctctcacaagtgaaatgataatggaaagtttactgaaaatgtcttaacagttctaggtaaaacttaatttttccttaatttgaaaattaataaaagtatgaattagatttaatctaaatttattattctgttaaagtcacatgaatgtggaaaaaaatcagtatcacttctaactaaatctggccttgaaacttctttgacatagtcttcttaaaatatatatatcttatattctaaattgtatattattt

SEQ ID NO: 227 - DNA, 300 bp, Homo sapiens
cactcagttgcatcctaaatatagcgtaggtgtgacataccctgtaaatttcaaattcacataaagaagtcccagccttcgaggcaagtcttaattgaatactaaataaaaaccttagtgtcttctgaaatgtttctgaataaatagttgctttacagtctttgatttctatgttcgttagtgtccaaattcagaatgggaaccaacttggggagaaaaagaaaaaaagactctcaggacaatctttttaaaggagtaacagataatctattttggctaagacagggtagattcaggtag

SEQ ID NO: 228 - DNA, 300 bp, Homo sapiens
cagataatagaaaggggagtcccttgtgtatcaactgatgctggaatttgtgaaatcctataaagttttgtagaaaaaaatgttaaattcatggaaacttgtttggtcataatcctcacagtttctaatttagtataacatcctgaataaattcattcagaccgacggagagaagaaattattatttgcaatatgtgaatttctgactaataggagtaatagaaaataattggtcccttaggatatttctgattatatatgagaggcttggggagggactctgtgtaaccgttgctttta

SEQ ID NO: 229 - DNA, 300 bp, Homo sapiens
taagagatatttttattctaggtaaattgtttacttaatcacctcctaacaaggctgtgtcagccaagttaaatatttaaatttatttttatttaaataaattttaaaaccaacagatttctttctcattttaatgaatttagcctttgagttttcaaagataaaatatacagagtagaacattttaatgtatctgtagagagggaacacaaaaagggcacatcaggaaaaaatagttggaaaaaagtgaattttatacaaaattaactcataaaatgaatataaggcattatttcactt

SEQ ID NO: 230 - DNA, 300 bp, Homo sapiens
ttgccaaaatctgtctttacagataatcttcgggagacctttatttttataggccctagttaaaatattttttgaatgcttgaggctctatttcactaataagagaaataaactttttctttctataaataactgctactagcttgtttgtcagctctctaaataaactcattttactattactatgcttgagtgctgttatatattcctttgttactgtgcataatccctggctataactgcattaataagtaaggccattacatcaaatagggatctaacaaaaactttcgaatggac

SEQ ID NO: 231 - DNA, 396 bp, Homo sapiens
ccttccatttccctactacacatgaggaagaataagaaattagaaaactagaaactaggtgtagaatgtatgcacaccaaggattgcatcttccaaagtacccttataggaagcagtcctgttgttttaaacccacagagttaggaagttttctttatatctaatacaaatcttctttgcttaaattctaacccatttcctcttagttgtcagtagatataatgagagtgaatcaatagataaaccaattcttctttatggcctttgaaaactgctagtgagtgacttcttggtcttttttcatttcatattgcaaaatattcattctaaattgtaaaatagatggcaccagtgtgacttgttaaaataaatgtttcattaaacataatttcagta

SEQ ID NO: 232 - DNA, 289 bp, Homo sapiens
gtaattgttttcagacttcctagagaaaagtgctcccgttgtatctaattctctttcttgtttaaaatacatcaaagatgagaaattgagctctttttagtgaacttgcttgagacattcatatggaatacagaaaataataattcctaacattcaggatgtcattccattgcaatgtggcacagagttttttctttgcatcaaggaatttatatgactgatactattttagtcaggataaattactgtaaaatgtgtccacttttaaccaatggcattctaacatggg

SEQ ID NO: 233 - DNA, 300 bp, Homo sapiens
aagtttgttgtattgtgcaagaatccaatgttttggattacttctttacctttttctatttgtttctctccaagtatcataaaaagcagtccacactaacttgtccttacagccttaattaaattgctatgagatattcacattttaaatgggatttcatggcaaacttgtattttatacccttcctcttattaaaggtcagcctgttataattaaaattttattaatttcaagacaaaatacaaataaccttaaaattaatctatttgtctctttgtaacataggtgtccaaatttagg

SEQ ID NO: 234 - DNA, 300 bp, Homo sapiens
tttatttaataaaggtgtatactaggttgcttttatttaaggaacagttatttatatgccacgttctagcagaaagtgattatagtatttattcttaagcattattttaaaaaaatgtgcctgcatgaaattgagaaaaactttatatattttcttatgctcataaagctaataaaattagcagattcattgattgcagaattgtttgcctttcttgcatatcttaaattcagatttagtcagttgttatatactatgaaaatattaccttacatattccttgatatctctttaacactt

SEQ ID NO: 235 - DNA, 500 bp, Homo sapiens
tgctgcaagcaggctggtggttgacaggctttgcccttgtctttaaaagcaataccctcacttttagcacagatgtgttagaaattaataatgttatttatatttaatcatacacatgaaacaaacttgaatttaactatgtggctaaatgtatatcaagttgcttatcattcattcatctcttatgttttattttattagaaatgattcctagtaattatatttttggttattttaatgcttttactctgatgaaaaaatatgtcagtttcaatgtattctaatgttctattatttccccaatggtgatttgatatgctaatcagcatatggcatggcccttaaggagtattttccaacaaagtaacttttttttctacaataggtatttacaaaatacttttatggctattttaggggttagtcttattttgtttttcttagtgattgattataaataactaagctcacctctttgaaatggaaataatcatacctca

SEQ ID NO: 236 - DNA, 500 bp, Homo sapiens
actggggaaataaaagcaatgattgaagtgaggtggttgagaatgggaggaaaacaggccagcaaaatatgcattatcatgtgagcaggcaaacacacatgtaaatactcaaattatttgcgtcaggaatttagcttgtgtttttgtggataggttagcctttgctgttattgtagtgttttacagtcaaccagaaacaagaattgccccatccgcagtatttctgtgagttttaataaattatagatgaagattttgtctcttaacgttacttgccatttcttacaaaataacacgtgcaataaattattccttgagtttatttaaagaaaagattgcatctgcaaacaaatttggagagtcctgtcctttttttcctcaaacaataaatactggaaaatccttaaaatccttgtatgaattaccatagctaatataaatcaccaacatgagtaaacagaatttataatatacatgaatttaactcatttataatttat

SEQ ID NO: 237 - DNA, 451 bp, Homo sapiens
tgcttggccggtttacagtgctggtctctggagctgatccgcccctttgctttgtaagtctcagcaattgacgaggctaggctgggcgctgggcttttctttttttttttttttttttttcctttctcactgccctgcggtgttttgaactgccttcttacagacgtcatacagcccttgaggaatagtttctgcctggtgagattgaatgatagttctcattcacaaaaccctggattctaagcagggacacacagaaattactttcgcaggtaaatcagcccacccagccaaagtgtggagagatttgttccttggctgacttctttgctccacggagaggagtgttttcctgtgcttgccctgaaatggaacttccttgacagctctcccgtgttacagtacctcccggtcattttctttttctctctctctacctgcgctcttcgag

SEQ ID NO: 238 - DNA, 566 bp, Homo sapiens
gtcagaaacctttaaagctgttactatggaattgcaaaaaagagatcaagtgactctttcactatgctggtttcccttgtgacccagatgaagaatcaattcagaattcagttcctcccttggcattgcaagacacagaagaaactgtcacttcctaacagcctagtactggagtaaattcagtatgaaggaagaaagcgctcctgcgtgttagaaccttgcccatgagctggaccgaggacaggagatggactccaggaaaattggatttcttcaagcagcctcccttggaaatggaatatctttaaaatcttctttgcagaaagacagttagaatgtattaatcagaatagttgaagacttattttcctttttattttttttcaaaatgagcattattatgaagccaagatcccgatctacaagttccctaaggactgcagaggcagtttggtaacgttcttttctctcatgcttttccccttttctcttttaagattgacgtactccttgagtatttagtaagttgtgtgatgtcgaggctttgtgaaagaaggcagtattgg

SEQ ID NO: 239 - DNA, 500 bp, Homo sapiens
ggaacagccttaatacgtgcagccacttgtccaggaataatacattcaatttttcagtttaaaattccagtatgttctgatccaagggtgcctgttacactctgctgaatttttaagaggtaatttacatctctacaaccaactccaaagcatgacatttcattacatccgctcaaaatgaacagctgctaagtcatcaagttctctcaactttgcttctaaagagaaaagtttagttttagtgcttcagtgaaatacttttttgaaagaatgacttttataaaattcatttgtttattatggtaaataaacaacttaatggcaaggggtgtgttccttgtaaaggtgatcacggaatgttacccagaataacacagacatctcatttcccagagaaggaaatggttttataagttttgtgaggtctcttgtctgcttggccggtttacagtgctggtctctggagctgatccgcccctttgctttgtaagtctcagcaa

SEQ ID NO: 240 - DNA, 500 bp, Homo sapiens
tgacgaggctaggctgggcgctgggcttttctttttttttttttttttttttcctttctcactgccctgcggtgttttgaactgccttcttacagacgtcatacagcccttgaggaatagtttctgcctggtgagattgaatgatagttctcattcacaaaaccctggattctaagcagggacacacagaaattactttcgcaggtaaatcagcccacccagccaaagtgtggagagatttgttccttggctgacttctttgctccacggagaggagtgttttcctgtgcttgccctgaaatggaacttccttgacagctctcccgtgttacagtacctcccggtcattttctttttctctctctctacctgcgctcttcgagtgtcagaaacctttaaagctgttactatggaattgcaaaaaagagatcaagtgactctttcactatgctggtttcccttgtgacccagatgaagaatcaattcagaattcagttcct

SEQ ID NO: 241 - DNA, 300 bp, Homo sapiens
tacatacatgcacacatacacatcatgaagagcaagctttggaatgaaatatacctgggtccaaaaattttgaacaaattgttgactttctttatgtatgaaattattattatcacatctactttggagggatgttgtgatgtataattaagaaagtatagtctacttagcatgtaggtaattaataattagtagttattattattatcctaacctgacagtttatgaaagaggtaggaaatctgaagataggaaagccttcaaaatataatactccggacttctcctttgggaattaag

SEQ ID NO: 242 - DNA, 300 bp, Homo sapiens
aatgtagctccaagcaaggttcatgccagtaggaaagtccttgaatccaactgtattcctagtaagtgtaataaaataaaagaaacctctagaaattgcctcaaaattcccctccagataaggaaaataacacaatatttctcaataatgaggaactgctacaggagttcagtgtcttattctcattaacgttagagtacaatagagaatagcaggaaactgtaaaaactgcagtcccctggtctttttttctaaaaagttagtttgacatatctggagtactgaatttcagcatatttg

SEQ ID NO: 243 - DNA, 300 bp, Homo sapiens
attggtatatagagttaggaactacttgattaaatacaggaagctactataaatttgaaataagaactaaagttataatgtgaccagactgggtaagcactgataacatttgtatatatttaaacagaaaaaaaatagttagaagaataatttttaaaaacacacaccagatgttggtaaaggcaaagatatttttgctcttgactttgtctatgaaagtcaagtgaatactttgaaagaattgatgatggataaggcaagtacattgatttctcaaggtgtgaattgttatcttcaaac

SEQ ID NO: 244 - DNA, 300 bp, Homo sapiens
ttgtgcttccataattgttttttctttaataatgagacatctagaccataactggctatgtgattctgaatctacctttacaacttaatctttgtgattcccctatataagatatctagagtagtcaaattcatacggacagaaagccaaatggtgcttgtcaggggctgggagaagaggagaataggaagttactattaatgagtacagggttgtcgatttggaaggatgaaaaagttctggagatggatggagataatcgttgtgcaacagggggaatatacattacaccactgatca

SEQ ID NO: 245 - DNA, 500 bp, Homo sapiens
taattatcaaggtactacaggaaatagggcactatctggaaatgctaaatacatctccttgcatgaatcacttcttaccagaattccctttctttccagatcccacctccagggttctgtggtccataccaggcactacattcctcaggggctacagcctatgagcgtctcatggggctatgaaaccatttgagacctggaaaatgaagtaattgaatacaaacagaaaactgcaaaatgaggactaacatttaattaaatgttcaaagcataagattatgtcgacttcaataattgtcaaatgagtattcttaacattttactaaattaaaaaaacttatgtgctgagttttttattttacaagtatctccaagtatgctggatgattgcaaagaaaatcaaggccagtcattggttaaatgagtttaatagtagccacataatttcaaaagcaaaattataaagacccttcccagactgttgatagcaaaaataatct

SEQ ID NO: 246 - DNA, 500 bp, Homo sapiens
cgttgtggaaagtgggtccatgttaatatgttagatataagtagtgaggcctaaaaaggtattaaaacatctttgcttaaggtactacctatttgcaagattgttattttaaaaatagcttatgttttaaattgttattgctttttatcactctaataagaatttatagttgctgtaagataacaagaaaaaggttaactatctgcagagatgcctgagagtcagccagggagtaacttaaatcctgcaggaatctgactcactgaagactgtcaactgaatgaaggcttaaatttcatggtcttgggtgggagaactttttcatattctttccccatatggaataacaatctgccctgaaaacagggagtattttggcatgatctctttttgcttatttgccttccattttccataaagcaacttttgccaagcaccatacttaagactcaacttttttgcaaaaatatcagacaaagcactgtctttaagaacacaga

SEQ ID NO: 247 - DNA, 500 bp, Homo sapiens
caactagaatcatttaaataactgtattttttaagaaagccatattattgctttagtttggtcattcatatatccaaaccttggactcatcatcttgcaatctcatgtgttcagttattccagagaaaacattaaggagaattgtattcttcttcccagctaaattttaggtcctcaaagctggcaaccacaatttatgctttctaaaaatcatctatgatactaagtatgagctggatcatgaataaaacccttgtaacaataaatgcttgatgacttacttcatctcattagcaagggaaggtaactcataattatcaaggtactacaggaaatagggcactatctggaaatgctaaatacatctccttgcatgaatcacttcttaccagaattccctttctttccagatcccacctccagggttctgtggtccataccaggcactacattcctcaggggctacagcctatgagcgtctcatggggctatgaaaccat

SEQ ID NO: 248 - DNA, 500 bp, Homo sapiens
tgagacctggaaaatgaagtaattgaatacaaacagaaaactgcaaaatgaggactaacatttaattaaatgttcaaagcataagattatgtcgacttcaataattgtcaaatgagtattcttaacattttactaaattaaaaaaacttatgtgctgagttttttattttacaagtatctccaagtatgctggatgattgcaaagaaaatcaaggccagtcattggttaaatgagtttaatagtagccacataatttcaaaagcaaaattataaagacccttcccagactgttgatagcaaaaataatctacgttgtggaaagtgggtccatgttaatatgttagatataagtagtgaggcctaaaaaggtattaaaacatctttgcttaaggtactacctatttgcaagattgttattttaaaaatagcttatgttttaaattgttattgctttttatcactctaataagaatttatagttgctgtaagataacaagaa

SEQ ID NO: 249 - DNA, 500 bp, Homo sapiens
atcttagttcctaagccactcaccaggtatttaaaagaatgatttaacacaactagaatcatttaaataactgtattttttaagaaagccatattattgctttagtttggtcattcatatatccaaaccttggactcatcatcttgcaatctcatgtgttcagttattccagagaaaacattaaggagaattgtattcttcttcccagctaaattttaggtcctcaaagctggcaaccacaatttatgctttctaaaaatcatctatgatactaagtatgagctggatcatgaataaaacccttgtaacaataaatgcttgatgacttacttcatctcattagcaagggaaggtaactcataattatcaaggtactacaggaaatagggcactatctggaaatgctaaatacatctccttgcatgaatcacttcttaccagaattccctttctttccagatcccacctccagggttctgtggtccataccaggcactaca

SEQ ID NO: 250 - DNA, 500 bp, Homo sapiens
tcctcaggggctacagcctatgagcgtctcatggggctatgaaaccatttgagacctggaaaatgaagtaattgaatacaaacagaaaactgcaaaatgaggactaacatttaattaaatgttcaaagcataagattatgtcgacttcaataattgtcaaatgagtattcttaacattttactaaattaaaaaaacttatgtgctgagttttttattttacaagtatctccaagtatgctggatgattgcaaagaaaatcaaggccagtcattggttaaatgagtttaatagtagccacataatttcaaaagcaaaattataaagacccttcccagactgttgatagcaaaaataatctacgttgtggaaagtgggtccatgttaatatgttagatataagtagtgaggcctaaaaaggtattaaaacatctttgcttaaggtactacctatttgcaagattgttattttaaaaatagcttatgttttaaattgttattg

SEQ ID NO: 251 - DNA, 500 bp, Homo sapiens
aaagactgccaagcagtttatctgggtaaactaaacattctgtagtcatttattctgcttccagtcatgcccagcaacaggttgagaagacaaatgttctcagaaatgatctccaaggagttgggagcaggctgcttatacgtctaattcaccagaataggtgagcgtggtcgtggtgaccttttcatactgttgcagagctgagtatgaagagatgactcacagtcctccaatgcaacacaggtgaccctgcagccagattttgccttcagtggtatgtgactcccatggggtcaggagagtatctcagacattgaaatttgacctaatggcctacctacctgcacacgcaccctgcccacttacagaagggcaagaactctgcattactgaggccttgttattattatagttcctatttaggtaagaacgcaatggagaaaaaatgcatttggttattgggcctctgtttgaatatcctgtgctttttgccaaacaat

SEQ ID NO: 252 - DNA, 500 bp, Homo sapiens
cattctacataatcttaaaaaacaaagtccatttcaaagaacaaaaataatgaccatatccactgagcaattgagcagaatgggaatcggagttttaaactctgatatatctgttttccttagggctgaaatcttcttttcatggttctagtttctctaattgaaataagaacctaaccctgttcaaaactacatctctgggaatgagtgaaaaattaatgatcctcctattttgttggatcataataatgactctcatcctggtggggccaccagcaatgctattcttctcagactctatcttagttcctaagccactcaccaggtatttaaaagaatgatttaacacaactagaatcatttaaataactgtattttttaagaaagccatattattgctttagtttggtcattcatatatccaaaccttggactcatcatcttgcaatctcatgtgttcagttattccagagaaaacattaaggagaattgtattcttc

SEQ ID NO: 253 - DNA, 300 bp, Homo sapiens
ttaagtcagaagtttattgaagcaaagtaaagtacattcggaagggaccaagtggaaaatttaaaagattgagtgccccgcttgatcattggttcaaggcttttatagagttactgtatcctgattcttcctgatctcctcccctcatccttcttgggggaactgttggctaatccttgcatgcgcagtaacttgctaatatctgtcaggggctgcatgtgccgtttggtggctgaagttgtgtgtatgctctccatgacaatttttcgttactggtctagtgcccccaaaggaaggtca

SEQ ID NO: 254 - DNA, 300 bp, Homo sapiens
atatcaggcaaactctgacgttttgccccttcttgagcatgcctggacatatccccgaaggaaggccaaactccgccattttgccccttactgcagatgcctggtcatgtttgcttagttcctgggatcttatgaggaagttgttgctcataagctcaagatgtttcctgtttgggaggaaattttccccttcttggtgccagccatgaccatctgtcattcccaaggaggcccctgacaattgcatgacagtcacctgactgttgcctgacattccttggggcactctcctaccctgct

SEQ ID NO: 255 - DNA, 300 bp, Homo sapiens
tacaaatatggtgcagtgtatactgcttgggtgatgggtgcaccaaaatctcacaaatcaccactaaagaacttacttatataactaaatataccacctgtaccctaataacttatggaaaaaaattttataaaaagtaatagatttaagtcagaagtttattgaagcaaagtaaagtacattcggaagggaccaagtggaaaatttaaaagattgagtgccccgcttgatcattggttcaaggcttttatagagttactgtatcctgattcttcctgatctcctcccctcatccttctt

SEQ ID NO: 256 - DNA, 300 bp, Homo sapiens
ggggaactgttggctaatccttgcatgcgcagtaacttgctaatatctgtcaggggctgcatgtgccgtttggtggctgaagttgtgtgtatgctctccatgacaatttttcgttactggtctagtgcccccaaaggaaggtcacatatcaggcaaactctgacgttttgccccttcttgagcatgcctggacatatccccgaaggaaggccaaactccgccattttgccccttactgcagatgcctggtcatgtttgcttagttcctgggatcttatgaggaagttgttgctcataagc

SEQ ID NO: 257 - DNA, 300 bp, Homo sapiens
aagccctatcacccttgtgagccacctgtccaaaagggccacagtgacttaggtctactcagtacagactctgaagtcctccacctctgctgtcgcccaccaggatgaactgaggaatctgctagagggaagagtgaccaaagagaatttttctggagatgggctggtgagtgagacagcaagagaaagaagacctcacgtaagcagagttgggtgcctccagccaaagatggcaaggcacagagggtcttaccgagaagctgcaatctgattcatgacaccaaaatgttactggcagcg

SEQ ID NO: 258 - DNA, 300 bp, Homo sapiens
gtttgggcaggatacacagtctttggttcttattgtctgagaagaaaaaatacatccaagagacagaagtagatttaagatggcagacaggaggcaggactagattgcagctctggacagagcagcatgtggaggctcgcattgtgaattatagctccagattgactgcaagaacaaaccagcaaccttgagaggacccacacaccctctgaaggaagcagactgctcttgcaggacctgggaaacaccccaaatactgtgagtaccccaactgtggaagtgggaaagggagaccctcct

SEQ ID NO: 259 - DNA, 300 bp, Homo sapiens
tttctctcaaattcccattctccatatccctttaggtaggtgaggatcttatccctagccagcagctgtaagggaactgggccttcctttctctggacatagcactgtaggtcccagtatatgttaagaatgtagatggtcagaggaacagaggaaaacctgcatctgagtccccttgtcatccctcctgtggattcctggggaagcatggaaaacaagtatttaaaatgacaggacaatccatctgccacccgtgggaatggtagaaaataagggatattcatggaaggctgcttttgt

SEQ ID NO: 260 - DNA, 300 bp, Homo sapiens
cagtctcacaaacagcagcccttagacctaagaggacattgcctatcagtcttctcagtgtagaggaagaactgtcagggccagggagtttgggatgagagaccacaaaaggcagagaaagaattgtcctctccccaaagtgcagatagctctagaaaggaagtaggagttgctcttaatggaccacatacagatgccctatggagacaaacaaatgacctcaagagccactggaaaacctggtctcaatgtgtagcaggatttaaaaattcatgataggaaataaagaattggtggaga

SEQ ID NO: 261 - DNA, 500 bp, Homo sapiens
tcctggcccatattcccgctttggcattgtagtcctgattggggtccagctggggaacagctgtagcccctccagggtagttggcattttccaggtgtaagtcatttcgacagtggattgctgctccgcagatggtctgtctttcctcttgtaaaagggcttgtcccaggagtacatttatgtccttccaaattaatctaaatgtaagagccaatttggggaagccctctatgagccttttggggtcatctgagaacttttttaggtttttcctaagttgtcaaaagtcgtacatggaaaaggggatctggacctggacgagttcagttggctcacttacctcctacaagcttggagaggagaactaaggagcccggtgtaaagtggggccaattccaaaggtctgggagtgggataaatagggggaggatccaggggtggctgtttctccctctttcacctccaaaggaggaggtagtttttccttttggcttctggag

SEQ ID NO: 262 - DNA, 500 bp, Homo sapiens
aagaaatgttggagaggaatcagcagaggagtctccagggccgatgcagggccctggaggagatggctaagcatagctaggatgtgaggtttgccttacaagctttacgaggattagggtcttccctttaggccataaaggtttgtaaataggggacctctggctttttgccctgataatggcagaaaaggtctagccggagaatggtattaaaatttgtacttccattctctagccagacttcctctgcaatgaaaaattagttttttcattttagggtttggtggttggatttatcgcagattttaaggatgcatccaaggggtcagtcccagagtatggagacaccgttatctatctgcaagacagaacagggaagagtaaggaagaggaaagagtcccttcttcttcatcttttttctttttctgtttttttttttttttttttttttttttgagacagagtctctctctgttgctcagctggagtgcagtggtgc

SEQ ID NO: 263 - DNA, 300 bp, Homo sapiens
ttgattgttcagaagcctctcaaggttttatttaggaatgatgtatccaactagaggtgccaggaactttgatagctgttgcagtggaaaggaaaacagtaaaagggcctttccatgaggggattagttgagattttgtagatccatcactttaggttttaataaggacctgggtgggtacacaagttggttgttagagggtctggagccagcagtactctctgtatatatatttggttctaggtatgaaattctctgtcttggatttggatactttgtaccttacattttgctaggaag

SEQ ID NO: 264 - DNA, 300 bp, Homo sapiens
ttaaggtttgtactgcatattgttgtgcaagctttatggagggggagcagatgagtaagccatctacatacagcagaagttgtccccactcaagatatagcttggttagatttctttgctgggtcttgtccaaataagtgtggggcatctctaaaaccctgaggtaggactgctggctttcctgggagaaactgggatattagggggaaatatcagtccagatgttgggtaaatattaagtggatacccattttggaaagtatattcctactcaaaagcagtgtgaggcatttagacatt

SEQ ID NO: 265 - DNA, 300 bp, Homo sapiens
aataagatccagagtactggggctaccttatgctgagctagcattagtttgaaagaaaagaaggcattacttataatttcattgaaagagatattatagatcttccaatgactcacaggaatactcaggtgctggtcctattgttgattgttcagaagcctctcaaggttttatttaggaatgatgtatccaactagaggtgccaggaactttgatagctgttgcagtggaaaggaaaacagtaaaagggcctttccatgaggggattagttgagattttgtagatccatcactttaggt

SEQ ID NO: 266 - DNA, 300 bp, Homo sapiens
  misc_feature 143: n = A,T,C or G
ttaataaggacctgggtgggtacacaagttggttgttagagggtctggagccagcagtactctctgtatatatatttggttctaggtatgaaattctctgtcttggatttggatactttgtaccttacattttgctaggaagnttaaggtttgtactgcatattgttgtgcaagctttatggagggggagcagatgagtaagccatctacatacagcagaagttgtccccactcaagatatagcttggttagatttctttgctgggtcttgtccaaataagtgtggggcatctctaaaac

SEQ ID NO: 267 - DNA, 500 bp, Homo sapiens
gttcattacatagagctgtgtctgtgggtaagttaacaggtagttttaaataactagatatagtcttttcctcttccatgtaagccaagataatatttccacttctccttctgaacatgtgagtacagtttatatataaatcaacagcaagatggaaatttactctgagctttgtgatgttttcactttaagatgctgtagttctgatcctttatacatttatttcattttccccatctcaaccccagtatatagcaacactcacctgctctagaacatgattatcaactgtttcagctatcaatgtaacattaaaaaaaaagttctatgttcaaagactaaaggaacccaggtagtttcttttaaacagaaagactagttttcatgatcataaacatgtaaagaaatatgtcatttttgaaatttcatgaatcttatgtctataccgattccaattccaaactcagactggcaatctgcctttattattgcaaagcccc

SEQ ID NO: 268 - DNA, 500 bp, Homo sapiens
tagcttgttatcttcatgtacctcttgatcaagtatttaagtgaaataaagagtctaaatgttacgggaggtgagtccaggcagggtctacggccctcagtttttgtcttcctggaagaaaaaaattcagctgagagacagatgtagatttcagacagaagcaaaagtttattgaagcaaagtacatttggaagggaccaagtgggcaactggaaagattgagtgtcccgcctgattattggctcaggactcttataaagttactatttcctgattcttcctgatctcctcccatcatacttccttttgggccagctgttggctaatcgccgcgtgctcagtgacttgccagtaatctgggaggggctgcatgcgccatttggtggttgtagttatgcacatgtactctttgggcaattttcctttactggtctagtgcccccagaggaaggtcatataccagtcaaactttgccattttgccccttactgtgcatgcct

SEQ ID NO: 269 - DNA, 300 bp, Homo sapiens
gaatagagaaagcagattcagtcagacgtaatctgactctgtatgcctgcaggggttgtggcctttgttagtttattatgcctgtaatttgggaagtcatgctgcagagatgtaaagtgggatgggcctgaaataggtcttgtaataaaaaggcagttagggaagcctgctggtgtcctgcctggttactactatctaagtgcagcaatgtgttagttgattttaataaagagttgaaatcattgttaactggcctccctcccactgagtgaagaaggcagattacacaggcacacgttt

SEQ ID NO: 270 - DNA, 300 bp, Homo sapiens
cctcccctagtgtgtactatgaatgcagctgcttctgaagggccagcacgtggccttcttaaaactttccttggctggggttttcccttcttgccaactggtgcccaccaagccagtggatgctctcaacgtctaggcaaatgccaaaaatgtcatctttggctcagatgtgcactggcctgttagagacaactgccatgcagagaaggaatgtcatcagctgctaggtctcaaattatcagcctggattgacagctgcaggatgtagtgcctgcctatagtactgaggccatgacccac

SEQ ID NO: 271 - DNA, 500 bp, Homo sapiens
gatgggaattgtcgagggtggaggcactgtacactacatgaagcatatttaaggaatgataacagtctagattgctagcaagcttgaataggcaaaataaaatagaaaggttagggactagttgaattagtcagaactgttgagattccaagagaaaaacaaaattcacattttctgtgttgatctattattgcaaggtgcattagtcagctattgctacagtaatgctaccgaacaatcaactacaaaataccaatgacatttgcttcttgctcatagtcctactaatgggtcagaatagtgctgcttcaggctgcaggttgccttcatgcttgttcttcatgtttctccttcttggaccagtgatctcccagggcgtgtccttgtggcacagtttacaactcccaatgtggcaagtagaaatgttcaatactttgtaaggcctcagtttataaagcagtatcatttgtgcccacattctgttagccacagcacataat

SEQ ID NO: 272 - DNA, 500 bp, Homo sapiens
tgactaaacccaatatcactgagggaggagagcatgaggaagaaaaggatggtgaatatatgctgcaatgcctaaaacataatgtaaatatagatagcattggatttgacccataagccataaagattctagaataccagtgttcccaactatggagtgcccaatgagcttcttgacaaactcaggagagtaacctccatttgtgtgacctcctttctttgctctttatttgtgcttttcaaagggatgacatgagcccataaactactcattgggttgcttggtcagaatcagaaccagttacttcaggactgtctcatttcatgattagttgcctttggtctcatgcagtggtatcagttcattcctctagaggtttatgttccctcaatcaccagcaatactgagtgaatgataagaactaaagcaataaaaaatgattgaactattttccttagtatgtagttattggacttcttccaaaaatccagcacacttat

SEQ ID NO: 273 - DNA, 300 bp, Homo sapiens
tggtatagaacaatactaggggtactataatttatcacagatggtcatcaataaagcaagagagagagataaaagagcttaaagaagaaattgcctctctctcagaaagaattagtgggagaatctgatgttcttcatgaaagaaaaaaattttagttgaatcttgcataaaaagattagacagatgggaattgtcgagggtggaggcactgtacactacatgaagcatatttaaggaatgataacagtctagattgctagcaagcttgaataggcaaaataaaatagaaaggttaggga

SEQ ID NO: 274 - DNA, 300 bp, Homo sapiens
tagttgaattagtcagaactgttgagattccaagagaaaaacaaaattcacattttctgtgttgatctattattgcaaggtgcattagtcagctattgctacagtaatgctaccgaacaatcaactacaaaataccaatgacatttgcttcttgctcatagtcctactaatgggtcagaatagtgctgcttcaggctgcaggttgccttcatgcttgttcttcatgtttctccttcttggaccagtgatctcccagggcgtgtccttgtggcacagtttacaactcccaatgtggcaagt

SEQ ID NO: 275 - DNA, 501 bp, Homo sapiens
tacagtaggatttctgtgatcatcttaaacctagcttttcaaaaggctattactgttccattttattctctggcccagaaaataaatcagaagacttctacatccttttcctcaaaagctgattctgattctctatatgatgccacattaataaagttttccctattaattaccatgatgccatgcagccttctaagatgttttctttagttcttagttcctttgcagttccatctccaagcataaattctcattaataatcagtacagtgaggaagatagacatgtgtcagtcagtgagaatgcttgcagctgtaactgccagaaagttgtaacttaactggcttaaaccaaagccatcctgaggtgggaggctccaagtcactcagtgacattatcaaaggcggcctgagtctttttcatctttctcttctgccagcctcaagtgttggtgagttttctggtttgttcctgtaaactcgagatgtctgtcacaggtcca

SEQ ID NO: 276 - DNA, 500 bp, Homo sapiens
ctattacatgcagataactatggccagtcagaaaagaggatcttctttttacgtcttcttttaagaaagaaaaaaaatcatttccagatggtctccccttgtcccacttcccttcaatgtcttattggccaaaatggtttcacatgccgatgtcttaacaaatcactgccttggaaatcgtactttcatgattagctgagacaatcaggtttccctcatggtggctggggctgaggcccacctccctgtaagtatgtggctgcaagggtaggtggatatttgaatttcactgggggcctagtaggaaggaatggctcttgggtaggctacccatagagtcaactacaagtaaatcagaaactatagtatcataagtgctacagggaaacatgtaaatgcaggatgctgtaggaacacgcaagaagggcccctggccatgcttgcttgagcaagagggagagaggaatgccagagtgggcttttaatgaaaatgttatctg

SEQ ID NO: 277 - DNA, 500 bp, Homo sapiens
aggcactacatgagtgtacttggtttcaccatctaatttagccctctgaagtgtagagtccatcgaggctattattttgtggattgtgtactgaagttgcttttctttgttctcccaacatacacttgtgacacttccaacctctgatatgtatatgttaaatacaggctgtttttcaaacaagataaatcaaatgctagctaggaagtgtgcctagagtttaaagcattctagaatgtactcccatataacagctatacttatataatacctacattgtgccagtgtttcatatatgtgaagtgctttaatcctcacaacaaacataggagggatgtagtattattaccccctttttacagatgtgaaaactgcagtacacaaggtgaagtgagaggccccaaatcacacagctagtaaatggcagtgtcagacctcaaattccactagtctgtcttcagagtctatataattaaccactgctccctgtgcttttaaag

SEQ ID NO: 278 - DNA, 500 bp, Homo sapiens
ttagtttaatggatattgtgctatttctaataaaaggatataatttttgttatatatttttcttcttagtcttcacttttggatcttggaccacatgtgctattatcatattttagctcataagagacttctctgataattttgtataaaatacacttatagaacatttgtatcttgtaaatgtaatttttcttaccattatctcatttgatcccccttatccacctctagaatatacagagctttatcctcatttttcagacgaagaaatggaccaaagaagactaaacaatttgttcaactccatatcaccagtttgtagcagttctgtgactagaaaccaaatttcctggctcttagtcctacattctttctagtatttcaaatcatcttttcatttctctcccttatgcttttggaaagaaaattgagaagaacgttaagaaccccagtaaaattggagaggcatttcttgagaaatatttaaaataatttaagaa

SEQ ID NO: 279 - DNA, 500 bp, Homo sapiens
aatcacccttgaatccatcaatggaatgaagcaactgggtggagcctatgggaaaatcctggaggaagtccccaactagtcagcctcccctctctgccttgcactcttggattccttagcgaaacatccaaaatggccttcttgcaaggaggatgcagtcggtgatccacatactgaccaacagctgtgtgtgaaaggcaccgtgcccaccacaacaaaggggcagtgaggtctgctgagcagatgagtcgcttttctggacccttccaggcttgcagttggctcagatgaaaagctcaggcttatgagctgccagaaagtatttggcaaaaagcccaccttttttctcaagtacacgtattcaattgacttgattcctcagagagatttgtgagggtgaaagcaagttcattgtccacttttaatgaccctcaacttctaatgaggtaatatatgtgaaagtgatttttttaaatgcaatgcaaatacagggtgttttt

SEQ ID NO: 280 - DNA, 500 bp, Homo sapiens
gtcattatttcagtacctgaggaaaatgtaaaaacacaaagccacacatgtaccaaggcactacatgagtgtacttggtttcaccatctaatttagccctctgaagtgtagagtccatcgaggctattattttgtggattgtgtactgaagttgcttttctttgttctcccaacatacacttgtgacacttccaacctctgatatgtatatgttaaatacaggctgtttttcaaacaagataaatcaaatgctagctaggaagtgtgcctagagtttaaagcattctagaatgtactcccatataacagctatacttatataatacctacattgtgccagtgtttcatatatgtgaagtgctttaatcctcacaacaaacataggagggatgtagtattattaccccctttttacagatgtgaaaactgcagtacacaaggtgaagtgagaggccccaaatcacacagctagtaaatggcagtgtcagacctcaaattcc

SEQ ID NO: 281 - DNA, 74 bp, Homo sapiens
tggagaaggccgtagaagaaaggaaagccaaaaaaagaaaggaatgagattttgatatattaattagctcatac

SEQ ID NO: 282 - DNA, 93 bp, Homo sapiens
ataagcctggacttttgctaggcattttccatggtaatttggttatacctcaaaacaattctcaacattattatcactgccaccacttctgtt

SEQ ID NO: 283 - DNA, 94 bp, Homo sapiens
gtgccccatgacctcttaaaatgtccccatgcccattcagaataccccaattcacttcaaaggcaaaaacaacgtgacattgtgaaatcatacc

SEQ ID NO: 284 - DNA, 64 bp, Homo sapiens
gatgttctagtagaactgtgttctggtcctattgagttcacccaggagaggcatcaaactctgc

SEQ ID NO: 285 - DNA, 97 bp, Homo sapiens
cattaatttcacctggttgtaaaaataactttttgtaatatggctttttaaaaatttaaaattacatgttgtggccatcattcatggttcacattat

SEQ ID NO: 286 - DNA, 57 bp, Homo sapiens
tttctactgaacagcgttgatctagacagtagacactacgcaaaaacagctaagaaa

SEQ ID NO: 287 - DNA, 61 bp, Homo sapiens
ttcacttcatgattgagcagaaattcctgagttcaaatcatggctcttccacttgcagctt

SEQ ID NO: 288 - DNA, 65 bp, Homo sapiens
tatgacatttatgaaattccttaagtgtgctctgtttcaggtgcctctgcgcctacatcattaga

SEQ ID NO: 289 - DNA, 45 bp, Homo sapiens
tgtaattatgttaagccaatcaaatgcaaaggacagttcaaaggg

SEQ ID NO: 290 - DNA, 102 bp, Homo sapiens
acaagtatgtaagccacattccaaaaaaaaaaaaaaagctttgaagtgaagctttaaaaagataagctttgtgttgagctaaagaaataaactctataaaaa

SEQ ID NO: 291 - DNA, 39 bp, Homo sapiens
aattgaaggaaagccccatctcaaacattcaaaagaatc

SEQ ID NO: 292 - DNA, 97 bp, Homo sapiens
gctcaattatcaatgtagactagaaacagagatagagaggggagatacagtttgagtgttttctgtattatcatgacagcacatggaacaaccacag

SEQ ID NO: 293 - DNA, 75 bp, Homo sapiens
ggctctgtgtgcttctgtgaaaatctttgttccaatgtcccacccctcacttcaatacatatgccatctaattca

SEQ ID NO: 294 - DNA, 89 bp, Homo sapiens
tgctttcagtaaggcagcaaaatgaatgaatgattcagagcacacttcttgcagacaggagagtgtataagagccataattgggcaatg

SEQ ID NO: 295 - DNA, 123 bp, Homo sapiens
gcttcatgggcttccatctggctcatttcatctggccaaaaacattggtcatgtggttgtattttactgccaaatattactccttggccagctgttcagaggagccagaagattctctgagct

SEQ ID NO: 296 - DNA, 27 bp, Homo sapiens
gagaggtcaactccatcctgtgtcatg

SEQ ID NO: 297 - DNA, 74 bp, Homo sapiens
catcatgagtcagtttccttcggaagcttgagaggctcagtccttcctttacttcctcttaatttgaatataca

SEQ ID NO: 298 - DNA, 82 bp, Homo sapiens
tttcccacagaataattaatttttttatatgtgctgctttcactgtttggaggttctagtttatctttccagttgcactgca

SEQ ID NO: 299 - DNA, 733 bp, Homo sapiens
cagattgagctttagaggtctcaaaatttgcagatatggtgatgttcactgagctcaactcttggtcaattttgtccagttcagagagggttaaattcactcttgggcacttgaagcctctctaatcttatcctgaagaagtggcgctctcccttggtttacagttgaggtcacccgcggggcagtgtttggatacagactgatgaaattatgctgcattgttaacattgaataccactcagtggtgaggaccgatgacggcactagggtcctttgactccttgggtacaatttcttgaaatagatgctttcccaaaatgtcctggactcataaaatatatgaaggattctatttggctttcatcatttatttaatttgaaagaaagttgttttaacagatttatcagagttaagaaatgtttctagggaatagaaaatggacaagataattgatctttgttgtcagagtcatgcattgtaattcactctctaaggtgacacagcatctccttgagggcaaagctgccaaaagttctgaaagtgatctgcctgtttttttttctcacactgacttttagagaggcgctggtattttcaagacgagtaaatcctgtttacatcctgtggaaggttggctaagaattatatccatctctttttaagagaagttgaaataaggaaaattatagttggcagttagctgtgtgaaatttagtaatctttgtcagatga

SEQ ID NO: 300 - DNA, 267 bp, Homo sapiens
ccagtcataggcatgtattttttaaaattttttaacgaagccctgtgggtttacattttttaaagttcacactgatataaaggtttacccacttcaatcacaccttttgttgtgtgtgcatgcgtgtgtgtgtgttgtgcttttcaggagtggcatgtgactatgctgtttaatcagggctatatttaaaaacaaattttcgagggagtgtttctcacgttaattatgagataaggcctgagtgaagcaaactctgtcgcaaaggcc

SEQ ID NO: 301 - DNA, 500 bp, Homo sapiens
cagattgagctttagaggtctcaaaatttgcagatatggtgatgttcactgagctcaactcttggtcaattttgtccagttcagagagggttaaattcactcttgggcacttgaagcctctctaatcttatcctgaagaagtggcgctctcccttggtttacagttgaggtcacccgcggggcagtgtttggatacagactgatgaaattatgctgcattgttaacattgaataccactcagtggtgaggaccgatgacggcactagggtcctttgactccttgggtacaatttcttgaaatagatgctttcccaaaatgtcctggactcataaaatatatgaaggattctatttggctttcatcatttatttaatttgaaagaaagttgttttaacagatttatcagagttaagaaatgtttctagggaatagaaaatggacaagataattgatctttgttgtcagagtcatgcattgtaattcactctctaaggtgac

SEQ ID NO: 302 - DNA, 500 bp, Homo sapiens
cagcatctccttgagggcaaagctgccaaaagttctgaaagtgatctgcctgtttttttttctcacactgacttttagagaggcgctggtattttcaagacgagtaaatcctgtttacatcctgtggaaggttggctaagaattatatccatctctttttaagagaagttgaaataaggaaaattatagttggcagttagctgtgtgaaatttagtaatctttgtcagatgacccagtcataggcatgtattttttaaaattttttaacgaagccctgtgggtttacattttttaaagttcacactgatataaaggtttacccacttcaatcacaccttttgttgtgtgtgcatgcgtgtgtgtgtgttgtgcttttcaggagtggcatgtgactatgctgtttaatcagggctatatttaaaaacaaattttcgagggagtgtttctcacgttaattatgagataaggcctgagtgaagcaaactctgtcgcaaaggcc

SEQ ID NO: 303 - DNA, 93 bp, Homo sapiens
gtggctacctgttttgctcatgcgaaatttggatctctatacaaaagcaaaaagacagtttgtgaagcgttacaatattgcaagttgattcag

SEQ ID NO: 304 - DNA, 73 bp, Homo sapiens
gagaatgtgttgtgtttatttttgaactctctgctcctccaaggttgctgctgttcagggcagttctcactca

SEQ ID NO: 305 - DNA, 103 bp, Homo sapiens
ttatttagagctctgcagaacataagagctaagttattggcaggagacgggcactttgctgatactttagtggggttaggacttacatggataacaattggat

SEQ ID NO: 306 - DNA, 98 bp, Homo sapiens
ggagcaatgtttagatttccgaatctggttttccctaggacatataaaattagtgtgcacaacttgtaaacataataatttgtctcagggatggaaca

SEQ ID NO: 307 - DNA, 54 bp, Homo sapiens
caacgacaccctcatcagaagtagatggtaaataacagtctgttatttgcttcc

SEQ ID NO: 308 - DNA, 98 bp, Homo sapiens
cattaacttctgctggctttgagtctgtaaccagagactatttcaaaatacagcactatcctgaaacccactatctgcctgctctggtttcctgaagc

SEQ ID NO: 309 - DNA, 53 bp, Homo sapiens
ggagtacacaagccccgttatcaaactgccttttgtcacactcttttgcaatg

SEQ ID NO: 310 - DNA, 103 bp, Homo sapiens
atcattctgaagatagaattacaacgacaccctcatcagaagtagatggtaaataacagtctgttatttgcttccacattaacttctgctggctttgagtctg

SEQ ID NO: 311 - DNA, 137 bp, Homo sapiens
catttcttcatatgattaaccttcaagatataacagctaatattttattcttacacacatgggatataaagatttcaaatagagaaaagtgttatctatcaaaactgaggactgatattctttttgaaactgataaa

SEQ ID NO: 312 - DNA, 41 bp, Homo sapiens
tggtatgcctatttaccatgctcatgaagtaaccaattggc

SEQ ID NO: 313 - DNA, 98 bp, Homo sapiens
gggtcttttttctttctcccaagggagtgattttgtttctcagcctagcaatttcatcactgcttttgcttatttgtaagcataattctaaaaagttg

SEQ ID NO: 314 - DNA, 103 bp, Homo sapiens
aagaagccatttctgtccttatttggtacgtggccaacaataagggtagcatgagttggagtcagtgttgcaactggtttcccaattaaacaacctgtctcta

SEQ ID NO: 315 - DNA, 105 bp, Homo sapiens
tcaggtgcctaatgcattttcaaatggcactcataagcatactaacgttttataaataaatgtctccatatttttaagatgaatggacaatttttgatttttaat

SEQ ID NO: 316 - DNA, 51 bp, Homo sapiens
tagtccccaattttcaatttttcaattttcatttaccgaatggagaaacag

SEQ ID NO: 317 - DNA, 108 bp, Homo sapiens
cactctgggtgctctgtgaagaatagagtaggagcaagagtagaagcagggaaaatggttatgacgccactgcaatagccttggaaggagacagtagtgacttggacc

SEQ ID NO: 318 - DNA, 57 bp, Homo sapiens
gggtgatggcagtggagatggcgagaagtgatcagattctggcaatgttttgaaacc

SEQ ID NO: 319 - DNA, 81 bp, Homo sapiens
tgtgggaactgagtaagcaagaaagagaatagaaaaggaggccataaagagaggagagggcttttgaaaaccatggaaaag

SEQ ID NO: 320 - DNA, 88 bp, Homo sapiens
gtttggattttatcccaaatggagagggaaactagtaaagggttttgagcagagaaatggcatacattttcaaaggatcactctgggt

SEQ ID NO: 321 - DNA, 74 bp, Homo sapiens
acgggttggacaagcttacaggtctaaactctgataatttcactacaccttggatattcatacttctggtgagc

SEQ ID NO: 322 - DNA, 91 bp, Homo sapiens
gaggctgcttacactttttataggccaatatcaatcataacgtttaagtgtttaataagtatcaatatttatctcatatggctctcagaac

SEQ ID NO: 323 - DNA, 101 bp, Homo sapiens
tctgcctctaatctttcctgctcaagtccttgcaagtagaatcaaaatatcaattgttctgaaattaattctgcttttattatttcactcccttgttcaga

SEQ ID NO: 324 - DNA, 51 bp, Homo sapiens
aaacttggtaagttttcacttctaaatggaacaaaggtcccactcctaacg

SEQ ID NO: 325 - DNA, 96 bp, Homo sapiens
tggaagattttaggggtccaacactcagctcccaacttctggactgtgtgcactaactctgggggacttgtatgaggcccaaactttgtcttctca

SEQ ID NO: 326 - DNA, 74 bp, Homo sapiens
tcttcaagttttggaatccactcagctaggggtgctgagatgggacagctgcagtgaagtgctagtgggtgtgg

SEQ ID NO: 327 - DNA, 55 bp, Homo sapiens
ggctgtttgtctgtcagttcctgcattgttttatcatgatttttagcttccttcc

SEQ ID NO: 328 - DNA, 110 bp, Homo sapiens
ttgggtttcaacatactcctgtacttcaatgatcttcattccaatccatattttgaattctatttctgtcatttcagccatctcagcctggtttagaagcttgctttaga

SEQ ID NO: 329 - DNA, 44 bp, Homo sapiens
tatgtggcatgtggcaatgagaagaatgtatattctgttgtttt

SEQ ID NO: 330 - DNA, 60 bp, Homo sapiens
gggtggagacttctgtagatatctatcagatccatttgttccagtgctaagttcaagtcc

SEQ ID NO: 331 - DNA, 57 bp, Homo sapiens
gggaggagtccatccttctcagttttggggaatagtttcagcaggaatggtaccatc

SEQ ID NO: 332 - DNA, 52 bp, Homo sapiens
cttctttgtacatctggtagaattcagctgtgaatcagtctggtcctggggt

SEQ ID NO: 333 - DNA, 35 bp, Homo sapiens
catcaagaatattggtctgagttttaaatttttgt

SEQ ID NO: 334 - DNA, 82 bp, Homo sapiens
atatttctaccaggtatttgtctcaggaagatgctggccttgtagaatgagttagggaggagtccatccttctcagttttgg

SEQ ID NO: 335 - DNA, 200 bp, Homo sapiens
ccctgtttaccctgatattattatgcattgcttgcctgtatgaaaatatctcgtgggccccataaatcaatcaatctatctatctatctgtctgtctgtctgtctgtctgtctgtctgtctacctacctacctattatgtaccaacagaaatttaaaatttaaaaaattatgttttggagacgtctagaaaaattggtga

SEQ ID NO: 336 - DNA, 200 bp, Homo sapiens
aatgtcacataatcaaataaagaaggtaatatataactccagaaaaaacaaaaagttgttccataaataaaacataattatggcacatcatttggtttatcagtaaacgttactttgcagggatgatacaatagaacactgaatgtttatttagccaataattgttatataactgtaatgggaggatagaaagagggaag

SEQ ID NO: 337 - DNA, 200 bp, Homo sapiens
tttcttcaggacattgctatttttccacttaaactcagaaccttagagtgatcactgaatcctcctctccctcatcagctttatctgccagaaggtcaagtcctctgagatgtacactgtaaaatctcatgctttcctgtgacttcatttccactgccactaccctctccttttgcatggatagctgcaatgatctccta

SEQ ID NO: 338 - DNA, 200 bp, Homo sapiens
ttaattagcctcagtctccagactctagccatcactccacattatgccctctggatgctgctactgagttcattttctgaaaatggtatctttatcatactctccacagttcaaactatttcttcactgcccgtcacttccagcataaatccatgtcctctgtgaaaccttttttgacaacttccatgccagatccaaat

SEQ ID NO: 339 - DNA, 240 bp, Homo sapiens
gagtaagacagtcataaacagaaaatccatcctgtataaggtaggcactgactcaacatgggagggcacatcagtcgattcttgctgaggcttgagagatgaggaggtataaattatccctcataattcaaacttaacccaaggtattgtccctgtatttactgaacaagaatgtgatatagaagaggcagtttagacctccaagcaacctatagttaatgggtaagatctaggttggaa

SEQ ID NO: 340 - DNA, 296 bp, Homo sapiens
tggcctgccactgattaccctaggcaacctggttaaccattcacagctagttgcctaatctgtactataacaatatttattggatacttactgagtgacaggtgttctaagcactagactggttttctcatttaatcttcacagcaaccctatgcaatgagaactatttactgtccctatgttacagatcatggagaggttagataagtgacccaaggttgcacccttagtaagtagataacaagcccttgccacagacttgggggatgattaagtaaaatgatgtctataaaaaa

SEQ ID NO: 341 - DNA, 88 bp, Homo sapiens
tgaaactcagggaaaatcaatgaagtaactcatcacaccctctgataagtacaagtgactaaagagtctaggaaatacccaacctcag

SEQ ID NO: 342 - DNA, 87 bp, Homo sapiens
aactagggtgtgactttattatactatgcttatactagcataaaggttgaacttaatcattcttttatgctcattgtgaaggaagtg

SEQ ID NO: 343 - DNA, 104 bp, Homo sapiens
gcttcatgaaaggcttctcgtatttcagttataaatgttcagaacagcatgccttcagactttgctagaacttgccaggagtggaaagtcatgactatcaacat

SEQ ID NO: 344 - DNA, 43 bp, Homo sapiens
gttattagttaacattgactgagtaccaacaatgtttttggtg

SEQ ID NO: 345 - DNA, 64 bp, Homo sapiens
ccatgcccagctgataatatgagtaagttttgaagttgggctttattttattacatgagaaata

SEQ ID NO: 346 - DNA, 101 bp, Homo sapiens
ttttgctcctttgaattttctaaacaaatattatacaaagcctttagaaaagcttaagatataaatgaaatgtaattccatttcagaaggtagttttgaca

SEQ ID NO: 347 - DNA, 103 bp, Homo sapiens
tcaatgtcaagttcattcattgtagctattcaatattacaatatagcattaattttaaatgactttatttcaggagggaaggaaataatttatgaatagcaac

SEQ ID NO: 348 - DNA, 83 bp, Homo sapiens
taaggtttcttatatgatgactcatcacaatgttgattgcaaaaaaagaagctgactcagactagctcctgtagaaaaggggg

SEQ ID NO: 349 - DNA, 97 bp, Homo sapiens
agagagaggtaggcgagttaaaagtttcaagtgctcagcattatagattcaccctcgagtcagaatgttaaaaacagcaaggaagagtgtgtaaaat

SEQ ID NO: 350 - DNA, 40 bp, Homo sapiens
ctaggtgaatgagagggcatctgtccacaatgggcaacta

SEQ ID NO: 351 - DNA, 89 bp, Homo sapiens
tcatgttttgctttgttgtgcctattaagtgatttatatagtctattgcgatttttttaggaatggaatatgccaattatagagagagg

SEQ ID NO: 352 - DNA, 55 bp, Homo sapiens
aggcgagttaaaagtttcaagtgctcagcattatagattcaccctcgagtcagaa

SEQ ID NO: 353 - DNA, 82 bp, Homo sapiens
tgtctgtttttatgtaagtacgatgctgttttggttactacaactttgttgtgtattttgaagtcaggtaatgtgatgcctt

SEQ ID NO: 354 - DNA, 32 bp, Homo sapiens
ggcattgttctttttgctcaaggttgagttgg

SEQ ID NO: 355 - DNA, 105 bp, Homo sapiens
tatacagttttcccagcaccatttattgaagagattgtgtttccccaatgtatgttcttggcacctttgttgaaaataagttcactgtagatgtaggggtttatt

SEQ ID NO: 356 - DNA, 97 bp, Homo sapiens
ctggctctctattatgtttcattggtctatatgtctgtttttatgtaagtacgatgctgttttggttactacaactttgttgtgtattttgaagtca

SEQ ID NO: 357 - DNA, 90 bp, Homo sapiens
cctttgcccatttttcaataaggttattttcttgccattgagttgtttgagtttcttatatttttggatacaaattccttattagaggta

SEQ ID NO: 358 - DNA, 97 bp, Homo sapiens
agcttgtaaatattttctcctaatctgtaggctgtctcttcactcagttgattatttcctttgttgtgcagaagctttttagcttgatgcaatcttg

SEQ ID NO: 359 - DNA, 70 bp, Homo sapiens
cactgctgttttcttgcttccctaatttaacattctcaccattgcagtcagcaggttaaatggcaaacat

SEQ ID NO: 360 - DNA, 45 bp, Homo sapiens
tgaggaatcaagggaaacaactatgcattgagtacttgcatgtgc

SEQ ID NO: 361 - DNA, 104 bp, Homo sapiens
catgtcccatttttcttctgggttattggtcttactctaatttatagactctccttaaggcaaatgataccaaaaccataccatggctgtttacagtcgaccct

SEQ ID NO: 362 - DNA, 43 bp, Homo sapiens
ccagcttacgttgcattaataattgcttcttagaagcttatgt

SEQ ID NO: 363 - DNA, 100 bp, Homo sapiens
ttgaaataacaggcccaagaattatagtaacaggagtttgaacccctgtttgagaatgttggtactcctgggataaatgagatcaattttagcctataat

SEQ ID NO: 364 - DNA, 54 bp, Homo sapiens
acggtgctttctacactttttagatgttagagaaagtctggcagcaaagcaaag

SEQ ID NO: 365 - DNA, 68 bp, Homo sapiens
tcccatctccccatttgttattgcaagaaaattagattctcattgaaataacaggcccaagaattata

SEQ ID NO: 366 - DNA, 55 bp, Homo sapiens
taacaggagtttgaacccctgtttgagaatgttggtactcctgggataaatgaga

SEQ ID NO: 367 - DNA, 98 bp, Homo sapiens
tctccaggttcctcagattcatcatctataaactggggaatattagtacatgctttataaggttattgtattaaaggaaataacttgtctaagtctca

SEQ ID NO: 368 - DNA, 68 bp, Homo sapiens
tgcacaaagtcttccccagaagacagacttgaaaaaatattaactttatttcactctcctcctgctgc

SEQ ID NO: 369 - DNA, 300 bp, Homo sapiens
cttcccctgagagagcaagaagggagatgtactctcctttctactctgcaggtgaatagtgttctggtactgccctagatacaacagagaacattcatagctggaacaaactggttggtgtctgccgttaggcaatcaagagactaatgaacatgggtcaaggtcactggtagagcagagaccagtacaaagtgacatcctgggcagatccatgcaggggcaattgcaaggcaccccccagagtctcagagatgctaagtgaaagaggttgtgtgagttactgaggtttatgctggagaa

SEQ ID NO: 370 - DNA, 139 bp, Homo sapiens
atgagcatagagctattgagactggagaactgattttaatgtgacctaatttatatctaccagcttgaagattaaacatctaaaaccctattacttcattactaattaattatgtgtttgttacaataatctatctgac

SEQ ID NO: 371 - DNA, 300 bp, Homo sapiens
aaaaacacaaccacttacactggtgccacagcaagttcatactctccagacccaattggatggagcctcaatactgccaaaatcccattcatttctctagtcagccttgtgtccttttttcccaataaaaactctgtctcttggtcacatggacatttccatcctatttctgtttgaggtagaaatctgctcctgtaccttgagtcccacctgcttctgccttttcagttgacttgctccttcacctgccacttgtcttggatcaccagctttagccatggactaagtctttaacatggg

SEQ ID NO: 372 - DNA, 300 bp, Homo sapiens
atttaaacatacttaaaacacttccttcaaaaagcaaagcataacagtgctaaagcaaattttcatgggtcctcctctgcctactgccttcctccctctaacagccaaataattttgcatctactctcaattttgcactttcctacaccaaatatactgacatttttagtgctaaatccaggaaattttttcttagtctttgttttactcagattctcttcagtatttgaagagtgtaggccactctctgtgcataaaacagtctattcctccatgggctcctagctaacagcctgcagt

SEQ ID NO: 373 - DNA, 200 bp, Homo sapiens
agatacatttttcccactgacaatttgctgattcagagaacatgcaacatccagccacgaaatagataaagctcaggcctgccctgtagaatatggtcacctggctttcctgttctcctacaaatgtcctactggaagaatagcccttaatcccttaatgttcatctaaaccaaggcttgttctaaattctctagactct

SEQ ID NO: 374 - DNA, 200 bp, Homo sapiens
tctcatgcattattacatctctcttggcatacttctcttcttgaagtgcataacatttatataccttctacaaatgttggtattattgatattgagggagggggcagacccaggtctatggccttatgtattattagtgaattacaatttcttagagtaataggccaatgattaaagtcacatgttaggaaaactttaat

SEQ ID NO: 375 - DNA, 200 bp, Homo sapiens
aagtaattgttccaatttcataattttgaagtattttctgagaataaactgggcaaatgcagaattgggacaaatcctatgtgcaataattgctaataggaagtgttctgaagtatgaattctctcctcctttcttgtttgacttgtcactgaatctccagtcctacagagtactatgtcctgcttattgtttatttata

SEQ ID NO: 376 - DNA, 300 bp, Homo sapiens
cacaccccacttctacgtataaacatcactttcactacggtggattcaaatgatctcttaggaatttagttacattacagtctcacataaaattactagcccttgaaaacatttgtttgctgggcagggagtggcgaaaccccatctctactaaaaatacaaaaattagccaggcgtggtggcgggcgcctgtagtcccagctactctggaggctaaggcataattgctttaacctgggaggtgcagcttgcagtgagcagagattgtgccactgcactccagccttggcacagagtgaa

SEQ ID NO: 377 - DNA, 253 bp, Homo sapiens
cctcccaaagttctgggataacaggcatgagccatcgtgcccagcctctgttgatatttttcaaatagaaaatcaattttaagtttttctttatcatatgaagcaaatattaaataatcattttatttagtctgatgcttgcttgattatattgtgatatttctaataatctattagattttataataacaattataataattgtttctaagcaaatgaactattttactgtatgttcaacctcctacagaac

SEQ ID NO: 378 - DNA, 300 bp, Homo sapiens
ctgtataattttctaaataatggaatctatgcagcagcgggatctatttataaattcactgcattttcagtgtcattattgggatatattcctgagtaactgctgtggagacagaaagtatcaaaatatacagcagaaatttgaaccatataaagcctgatgggcctgacaaaggttaacagaataacataacattcagctctactccttttctcaccctcgtctcatctcaaaatatatgcaggaaatgcctcctttttcaacctccttcgcattctgaagagaatgtagaactttgtt

SEQ ID NO: 379 - DNA, 220 bp, Homo sapiens
aggtatagatagtatgtgattcataatgacgcatgtatgccatgatttacctcagtcactggacagtaagaatgtgattaaggaagtttcctctgcaacatttcaagataagttagctgttttgagccacacaaatattaaactatgcattgtggccaagtgcctataatgccaaaagcacctgtttcaaattgtgagtaatatcttatgtgttacacta

SEQ ID NO: 380 - DNA, 300 bp, Homo sapiens
tgaaatctccttgttacagaatattaatactacctattgaaaagagtaagaaataagagtttctcatttccacccttttggatttatttcatcaaatgatgtgttgatgaataatgccctttctgtaagatggataactcatggaaagaaagccatttggacatggatactcaagattttaaagaatttaggaggtggcagtgtgaatatcaaataaggtgccacttgtagagagagtatctcagaaaaggagcagagaatcatacaatagaaaagtgaaaagctgtttcctgtggtaga

SEQ ID NO: 381 - DNA, 300 bp, Homo sapiens
gatttaagatcatttcttccagctcttctgtggtgatagattacagccaactttagacatactaaattaactacatcaactcttagtcataacaggaattccttctacaatattatgcacacatggtcttgcagggccatttgtcactttttctatttgatacaaaattatttctcattaataatctaatcatgaaacacctgtttgttaggcactgaaaaaattttccctgtttgaaagcagaaaaacaaagatttgtatgtttacttcagagaggattttgtgatttctaataggaag

SEQ ID NO: 382 - DNA, 252 bp, Homo sapiens
aaacaattgtttttcttttctcaagtcttttaaactactctgccttctattgacagagtaagaaattaaatcttcaattatttaacatagcattttatctaattaaaaataacagattttttttttctgccaaagatttgaaacagagatggaaagcatgtgtgggaaattctgttacctttccagatctctgcttgaataaaataaaggcattttctgaccacgataagcacactgtctgatccagatcct

SEQ ID NO: 383 - DNA, 200 bp, Homo sapiens
gacataacccatatttatagagatattttcaatatggtggagctagtggtagggtagaaagaacataaaattgactataaggaaatataaatccttttccgagctccctctccttatgcacacatatatacatatttgataaaataatggccctgaaaaaatattagagtggttttcttaaaacctaaagaaaatggtat

SEQ ID NO: 384 - DNA, 200 bp, Homo sapiens
cacatcagtgatgctcaattgctttttattatggacaatgaaaccaaattagattaatcataaggcaaaatttcaaatgaaaccagtaatacagacatagtgtctgtaaggttttatagcagaacatcagcaagatagcagaaacttaatgcatgaagtaacctctcaaccttgttaaagaatttcttttatatttcttg

SEQ ID NO: 385 - DNA, 200 bp, Homo sapiens
tccctgcatccagccttcatttaccatgaccatcaggcatctgcagggccttgacctggaaaagctgccaccattcctagtagaggatgaacataaattctcactctcagaaatgcaaatatttcccttgctgtggggatgcataacttcagagaaaagctaagcacatggagcaccccatgtaaattaccatctcatac

SEQ ID NO: 386 - DNA, 200 bp, Homo sapiens
acaactcactgtaaccttatctttatttcttataaatactgtttgtaaagaatataaaaaattgaattccacatgcaagataaaggcacagccacaatttcagaatgacatctaatatttctgaagtaataaaataaatgtaaccctgtggaaaaataaaacatttaaataaaatagttacaaatgcaataggaaactaa

SEQ ID NO: 387 - DNA, 301 bp, Homo sapiens
actgggctgtgacctgatacactaaaatgaaatattgatagaaattgtgctcatgaagtttttccaaacagcaccagaaaaggaagtgccagaaatgtcagaagaaagcctattttcatgggatttcctgccttccttacatcccgacatgtctaaatagttcagataacctccagctgaactctaggttgctccactcagactgaaatcaaacagctgagttgagggccactcattcagcaatgggtgcaatttaggaactgcagtgataaagcagcgcaaccaaaagggacactggaca

SEQ ID NO: 388 - DNA, 300 bp, Homo sapiens
ggaaattctggtcctggctccgtaggaactcatgccagctctcctgctctggcacccgatgcctggccttgagccaaccttctccttcagtgcatctcccagtgtttattcatgcctttcttttattcactgtttgttgctcacaattttttccaaaaagaaaatcttcctcaaagagaagccatcatttcccaataactgctttaagacagaaaaagtcaatgtttgtctcactcctcttatggccattacatctaccaaactcagaaatgccatctaggtgttaaaatcctggggaca

SEQ ID NO: 389 - DNA, 500 bp, Homo sapiens
aacattttttgatgaagtcatagcacttatgtgtcattgaattgttgtgggcatgctaacaggaaagatggaccaagtggttgaccctgtccttctgtgaatagaacctcagagtacacttttctgtaaacatttaaaagacaaggaattggaacttaaaatggagcaaccaggggggcagggaaacagaataaacttttaaaattgacctaatagtaatcataggaaacaaaaagaatcattccagtctccatttttttttttctggatgcattttgtagctccctaagttattgggtttttaagaaacataaaatattcctagatcgttagagatgtgatttgatttcaatcccacatggtctgtagcatcactaagctactgggaacttccctatgcaaaggtttgagtttctttccaatgctgtttaatgtctgcacttctagtgtccacataaatgagatttaacaggctttacttcatactttcttgttacaac

SEQ ID NO: 390 - DNA, 500 bp, Homo sapiens
tttttactttttttccaattgcaaaattatttcttttaagctctctgaataagtttgttgaagctctattcatcacacataaaaatcttacattaaaaggcaataaaggaaatcacgaaaagctagatgtattccaccctcttatagttgaatacataaaattgtatatatcacaaatagtaattgaaactactcttatgaaaactatctgtccttctggaggggcattagtttaaatgcaaagagaaaacatatcatttgtgagtctaaatagtgttgttagttctttgaaagggccctaattaataaggttgtagaacacaactgcaacctgtaaagcgttccatgtgtagtattttgaaaccttttgtttgtttgggttctaactagagacagagggagaaaaagtcaatttcattctcatgggatttgtcttatgtggttcatcagattgagtttagtaagcagggaagtatttctccttgtgtagctagtgcttg

SEQ ID NO: 391 - DNA, 65 bp, Homo sapiens
agccctgccttgtttttgagttattctctgtctagataaattattggtcactccttttaacccag

SEQ ID NO: 392 - DNA, 77 bp, Homo sapiens
aggcaccaatcatttctattattaatttgattcttagtatttattttctttgttgggagttttatttatattccctt

SEQ ID NO: 393 - DNA, 39 bp, Homo sapiens
tctcccaacaggcttctgtccacaaagctgttatttaga

SEQ ID NO: 394 - DNA, 134 bp, Homo sapiens
gcatggccccatccctctcatagtctttgctaaggttatgtcttttacatttggagatacaccaattgcagaggagggtgaaattagcctgagagcaggaccataacaataacctgattctaatggaggctgtt

SEQ ID NO: 395 - DNA, 39 bp, Homo sapiens; identical to SEQ ID NO: 393

SEQ ID NO: 396 - DNA, 134 bp, Homo sapiens; identical to SEQ ID NO: 394

SEQ ID NO: 397 - DNA, 57 bp, Homo sapiens
aggatcacctgtgtccaagttaattgccttcttttgctgtattcattagccatcaat

SEQ ID NO: 398 - DNA, 93 bp, Homo sapiens
cctacataatctaaggccaagatacatatggagcaatctatggacaggcaatagcatcccatgggagctttggaaattcaggagctcgagcct

SEQ ID NO: 399 - DNA, 94 bp, Homo sapiens
tgccagaaaattaccgaaaaagaaagttaatgctttttccttctcaaaacccttctataatgtgtaggcattgtcatattagagagactcctgg

SEQ ID NO: 400 - DNA, 77 bp, Homo sapiens
aaatgcttggtcaactaaaattgttaaagagctaaaattgaacattgactcagaagcaatgtgaaatacatcttccc

SEQ ID NO: 401 - DNA, 267 bp, Homo sapiens
caggggtgggagcaaatgcatggtccaaggttctgaatggcagagctagaccaaaggactaacctgctaaccttgaccaaggagatggcccagaggttttctatttctactgctccatcttttcattataagttcccagtagaaacgagtcatcatttaaaatatcggtgcagcacttaacacataaggaaaaatcaataacattcatttacttacagtacccagagaagaaataaattcaaatacgtaaaaatgggcatgaaccat

SEQ ID NO: 402 - DNA, 300 bp, Homo sapiens
ctgttccatatcccactttaggactgtcagcaactgtatacattgctgaacgtcattgctcttgtacataatgaataattttctgtaaccctgtgaaggccgactgatttttacggaaagacagctttgtgttaggcggcccgccttccccacggaatcgggttttcccacgccacgttttgatgtttctgagaagtgtgcgccatctgctggccgctgagaggattgacgagcagccataaggagcaccgtgtttcttgagcatgacttaaccaggcaatggaattacaattatctttg

SEQ ID NO: 403 - DNA, 246 bp, Homo sapiens
gcgtgcctgcatgcctgtgtagggagaaagagaaagctctttgcctcttcttataaggtcagattaggaccctacccttatgaccacatttaaacttatttactgactaaaagccctatcttcagatatagtgacattgagagttcaacatatgaacatatgagctgataggaatatatgaattgatgggaacatatcaacacttcaacatatgaattggggtgagggacgcaatacagtccatag

SEQ ID NO: 404 - DNA, 300 bp, Homo sapiens
ggtgacccagcatatatttaataggtcattaatgtgtttactatgtgtctttcccactcctcccggtattagtaatctaaataccagtaaggatttgaggttcttctttgttgtattcctaatacctaagacactgtcccacacatggtagatgttcaatacatatttgttggataaataaaaaatacagagctccctcttctcccctacatgttggaaaatgtgtgtgatctaaatgagggagagggagaaccatctcatctaatcttccaaacttcctgagccacctttagctactga

SEQ ID NO: 405 - DNA, 300 bp, Homo sapiens
atatcacagttttaacaataaataacctataataacggtattaagagtgagtaaagcacatcaaaactacaatgagacaccacttcataccccttaagagggctaatataggaagtatttttaaaagaagataatgcatccattagaatagaaatatcagctgtaaagtgttcaaaaacactgggttttaaaaataaaatccgtaaccggggtaagggctgcaagttttcaacctctgccttaactcatcaggataattctccataaaatttgagaaatggcagaacctatttcgttgac

SEQ ID NO: 406 - DNA, 200 bp, Homo sapiens
gaggtggtgacatgacaacaggaatatgaactccatgggtgagagatggaagggaatacccaggcacacaaggctgctcaaggaaagacaattgagctgccttttcatacaactcggcgctgtgaggaggaagtgttttctagtgtccagaatatgaaacctgtaaaaattgtttttttacagatatacaactgtttaaa

SEQ ID NO: 407 - DNA, 236 bp, Homo sapiens
aatgatatgattcttatctattactaggaaatagtggtattgaagtagaattatgagctctacattcagtctacttttcacatcggattgtcatctcatttttggagggtaattctctttagattctctagtcctaagctgtaatatgtcttatagttgtcatattttagtgaacaaaccagaaaaaaagattgcctgcatcatatgtaatttttgttcaatccaagggcaatatc

SEQ ID NO: 408 - DNA, 282 bp, Homo sapiens
tagaatacttgactcatagtttaaaatgatcatttttattgagttcaaattaagtcttctgtagatataataattatgtgaatcaaaaatatgtatttgtgtgaagaaatgctctttcttttcaggcttgccttcaaaaaaagttagtctcatactgaatggcaataatttcttcttcctgcctcctaagaatacattgaggatataaaattatgagactagaatgctcttatttcaaaaacattcacagtaggcattggcctgagcaataattgtgaatgt

SEQ ID NO: 409 - DNA, 300 bp, Homo sapiens
cagtggtaatagcagaacttacattttagtgggaggattaaaataatgtacatgaaatcaaatatataagtcagcactcaataaataatagtttgtcatcattattactatagtaaatgaccactatctgaaatgggatataaaaaggaaagtgaaattactaaataaatatgagcgtacaaagacctgacaatttagatacaatatactcactctgtctcaaaatagtgtcttctgaagctttagtcagaatattatggtgacatttctgctagatttgtcattgagttgctgggtttg

SEQ ID NO: 410 - DNA, 277 bp, Homo sapiens
ggaagaacctaggctacacatttctcttggctctacaaaaggctgtggcagtgggtccctgagtaaaccaccagaagaaacctaaggggcacctctgtttttcagttaatcagttttagctcaactgggatttaatcctgaaaatctaaattacatttacagactttaagttattgtgaatatttacactacatgggagaattaccaaaatatattcgttactcatacagttttcgaaaaacaggtgagacatcttccagttaaattcatcttcctt

SEQ ID NO: 411 - DNA, 300 bp, Homo sapiens
gcactttgggaggccgaggcgggcggatcacgaggtcaagagattgataccatcctggccaacatggtgaaatcccatctctactagaaataacaaaaattagctggacgtgatggcactcgcctgtagtcccagctactcgggaggctgaggcaggagaatctcttgaacccaggagacagaggttgtagtgagccgagattgcgccactgcactccagcctcgtgaccaagtgagacctccgtctcaaaaaaaaaaaaaaaaaaaaaaaagaaggaatctgtatcctgcttgaaaaag

SEQ ID NO: 412 - DNA, 300 bp, Homo sapiens
acagagtgagaattcctccttaggtcccatcactgactcctcttttcctccttgcactttaaatggtgcacctctggcttccatccttgagcttttccccactggcatcccttatttaggtgttctttctgatgctcatcatattttcctagtaacttccaaccaatccacactattctctcaattcttctgagttcctaaaatctgatatattgaaagaacctgaactttggagtcataaaaattctagcattagccataaaaaaagaacaagatcatgtcttatgcagggacatgaat

SEQ ID NO: 413 - DNA, 77 bp, Homo sapiens
ggtggtgaaaatcaggttggatttgaattattccaatttaatctggaaaaaaattataagtcacttgtactgttagt

SEQ ID NO: 414 - DNA, 91 bp, Homo sapiens
tatgagaaattagaataagagtttcggatagaggtattttgccacagttatattgaggcgaaaggtggcaagcatttcaggggaaagaaga

SEQ ID NO: 415 - DNA, 78 bp, Homo sapiens
caagagtgacatttcaaggcatattgattcatttttataaaaaatataattatcaaccacaaaaagttaaacatctct

SEQ ID NO: 416 - DNA, 77 bp, Homo sapiens
aaaagttagctaagagcttgtgacagatggacatttagcaactgagtaatcattcttcaggtctcacaaatctgtca

SEQ ID NO: 417 - DNA, 200 bp, Homo sapiens
tattcagtctgaaaatttacttttacaccaagcatataaacaaaatgaaatacagtttaagaaatcagctcataacatttacaattaaattcattaatcaaggcagcttatggaaatgccacatgtgaactgtaaactttataaatattcaagtagtgaacaactagacaatcacattggcagctttgtttcagtataag

SEQ ID NO: 418 - DNA, 200 bp, Homo sapiens
gatgtagaatattaccatccatcagcttgcagttttgttttaaaacttgttgaaccatgtatatcatcaaaaagaacttttggttacatttctgtttccatatgtttcccatttaccttcctctctagatttatgtgccttcgtactaattagcacctgcactgaattcagaaagcagcacttgaatcaaaccaagtcaa

SEQ ID NO: 419 - DNA, 200 bp, Homo sapiens
tatattttctaataaaatcccacattaagttagacaaaaactctgtataactatggaatagactttactaatggaaagagtaatgtgaaaagctaaataggaaaattttaggcacgtattttcacaatagatcttgctgtacttgggggaggcttgtcttcttgattactaaggttaacttagtgcttcagaagccagcc

SEQ ID NO: 420 - DNA, 200 bp, Homo sapiens
gtttttatgttctgctgttttcctgattttggtgtgtcttgatgccactgtgttctagtaaaaattcccttcaatagactgccaggagagcagaccagggagtgtgagtgttttgtgcatgggcgagcacatacagatgttaggtgacagtggttattcagtcatgctttcagacctggagaacagttcaggtcaaaatc

SEQ ID NO: 421 - DNA, 118 bp, Homo sapiens
caatccaatcaagttgacactcagtattaaccatcacaacacataagtcattaacttaatcatgacctgtttccaatccaggaatgaagttctgttcttagaggaacttcctaagtac

SEQ ID NO: 422 - DNA, 427 bp, Homo sapiens
taagtacacagaggctcactttcccaatctaaaagctaagactgttccaagtgcatatgctttctgtttttttctatatttgttatctcacagaaacattgatttgccattggttcttgcaaaatcagtattttataactggaggtggtgttaaggtttattttgtataaccttttgattttatccctatggagactaaagaccagcaaggttaagaccagcagatctggaacaggttattatagaaatttgtatattatgttgttgctagcaaatggaattattgcaaggagatgatggaaaagatagtatttctgatatctccaagccattgtttttcaaaatgtgttgttcaaaccctccgcattgggatcagaggtggtgcatactaaaattcagactcccaggtcctattccagatctgctg

SEQ ID NO: 423 - DNA, 244 bp, Homo sapiens
aaatgaaaatataaagtctaaaacaccagagggaagtaggaactaatgttgtttgaggagcaataggagcaaaggtgagacatagtttaataacaactgtaggtttaggtggtagttacagaagcataaatcaataatatgacattattccccccaaatattcattcattcttgggtttcatgaatagaactgggtttagaatagaaaaggtaatgatttggctgtaaatttatgttgcttctc

SEQ ID NO: 424 - DNA, 410 bp, Homo sapiens
catagctagagctatgaccccaatcctgggcaattcactttaagaactttgagaagtagtgtacacctaaaacttgcaatcctcatggaaagatgagtccaaactgtgtcacgtgaagaatacctaaagctgtggttccaaacttatggccttcagatgtgttctaaatggcccatatggggtttttagaaatttgaatttgcggcagatgtttcaaaattagtagatgtctcattaaatatagatttctgggatttactcttgctactgtgagggtgtgtgatcctgtgtttgtgttcctctcagaccactttactcatttactttaaatttctggtgcctatagcaatggggtgctaacacccggggggataaaaaaggactggggaattcatggcctgtaaaacagg

SEQ ID NO: 425 - DNA, 300 bp, Homo sapiens
aaggaaaaagtagcatgcactcatgcagttcttgttgggaggatagtttcttttccttctcattcggcccattaaaaagttcaattaatttcttttaaagatttcaattatgaatgtatcttaggcattgatagggagtaatttttagatctgacttatttttatatattattgttcatttttatagcttttctgagattcttggcagtgagtcagcacacagcatttctacctatagtccaatttatatgagtcctactttcatgcaccactgtgatagtgatgtctcggttagtggct

SEQ ID NO: 426 - DNA, 300 bp, Homo sapiens
tcatggtcagtagcctgaagatctatagcatctacatatttagaatggatttttaatgtctatgagagcctttatttctccactacccggttcctttgtggatcctgagtctgaggagaacataactgtcaattagaaccactttttaagaattgctgtaattaagatttttgatgaccgagttattaattaggaaacagggtctccatattttgctctgctgcttctttatgtcctagagcaagggtcagcatacttttactgtaaatggcctggtagtaaatatttccagctttgtgg

SEQ ID NO: 427 - DNA, 300 bp, Homo sapiens
tggacagaaataaatttgtcatcttcttgtaccttttactagtagtataacttagggcaaattgctgtgcttctgggattcttatttgctgcttgtaaaatagaaaacatgacacagatgctactagatctttgtgacaactgtacacacatatgcatacacacacacacgaggtactcacagtggtacttaacaatggctactatgttttaatggtgtacttggcagaccagcagttaggttttgaatggactaactgtggttttatcatatcaggaccaggttgtaatcagaaatcag

SEQ ID NO: 428 - DNA, 300 bp, Homo sapiens
gcttgcatagctcaaggtgattaaaggtaaaaaggttaaaagttgagaagaaaggttggtgttagatactattagttcttggccaaaagctgttggccttgggagaggtggaagtttgagatcagggatcacagttatatgagaacacacagtgatggtgaagtttggaaccagaaaataagtcaggattatacggggtccaaaaaagcggagtcagggcactcatgaatctaaaccagatatagaagcttatggagtcagagagcagaaatcagggacacaggcaagaaatccaggaaa

SEQ ID NO: 429 - DNA, 300 bp, Homo sapiens
tctacttgtctgggtggactaaaagagtctctagtccactgtttttgttgctgttgttgttgttttgttttaaacattcccatggaaatatttagcaaggacattttcaatgaagaaatatgaatagtgatctttgtttcgtgactaatgctgtaatttttgcacatgtaaatgaactgagcctcaaattattcacattctgatatatctctattcaactctcaaactatcatttcatgttataattttgctaccatttataaaaaccatcaccacattacctttttaatagttgaatga

SEQ ID NO: 430 - DNA, 300 bp, Homo sapiens
agtgttctgactttgagggaaaaatctgctaactagacaatcccatgtgacccacaatttgttgttaagtataaaaaataaattaactcataatatttaggatttgtttgtttgttgtttctgagatagggtctcactgtattgcccaggctggagtgtagtggtgcaatcttgtctcactgggttcaactgattgaatgcagtgagactccacctcctgggtttaagtgattaatatttagggttttttttaaatcatgatgtctttgttacttacatggaaataaactaatttatggt

SEQ ID NO: 431 - DNA, 511 bp, Homo sapiens
aaaacattttttgaattcctggagtgtaaaagtggtaggataaccaaaacatcctctttcttgttgaaccatcaacaattgtcttttgaaaagaggtttgaatatcttttctttgaaaatcctcgtgcaaaacttcacaccatgatcatttatgaggtagttatcagacactggagatgaattactggggatttttgtgttctggttctcagtatacaaccaaaggtagaatattgacattgaaaataaatgtcactcgtttctcaaggaaaatttgtagtttaccgaacaacagcacaaatgaaagctgagatactttaccagtgatattgtaggtctcagtgagtaaaaactcaattaaaagtatattggggtggcgggggcactgtgtatagatagacctggacatgatctctaatcacaaatgctacttttagaagggccagattcttgatacagagacattttatttggtggcaataaccatggcttgtccacagaatgatgccgt

SEQ ID NO: 432 - DNA, 562 bp, Homo sapiens
ttattctcctgacctaacttcaaagaaataaagagtttgcaagaagaactgcagttcttcaaagtacgcaatatggatttccaagatgaatgtagtttctctctctgaggaattctgaacagtggtaaagtttcacaagtttatgcatatcttttgctctacatccttccctaaaagaacttgtggcaacaaacaaagggaaagaaataacattttttaataactatgtggaaagctctatagtaagtgcttcacatgttacctcatttaattcttacaactaccttatctagtaaattatctcccatttgacactttaaggaagcagctaagagatgtttcataactttcctagaaaaggtaggatttgaatgcaggtttgtattattccaaagctcacaatgtgctttacgcaacatcaaagtaacatattgcgggaatgagtacctttcccatttaaaacaaatgagtcctggaaactcttaccctgtttagttatggaatggctcagaaaatagaaagtgttgagatcatcaaagagagaagttaacaaagagcattg

SEQ ID NO: 433 - DNA, 300 bp, Homo sapiens
cttttgaaaagaggtttgaatatcttttctttgaaaatcctcgtgcaaaacttcacaccatgatcatttatgaggtagttatcagacactggagatgaattactggggatttttgtgttctggttctcagtatacaaccaaaggtagaatattgacattgaaaataaatgtcactcgtttctcaaggaaaatttgtagtttaccgaacaacagcacaaatgaaagctgagatactttaccagtgatattgtaggtctcagtgagtaaaaactcaattaaaagtatattggggtggcgggg

SEQ ID NO: 434 - DNA, 300 bp, Homo sapiens
cactgtgtatagatagacctggacatgatctctaatcacaaatgctacttttagaagggccagattcttgatacagagacattttatttggtggcaataaccatggcttgtccacagaatgatgccgtattattctcctgacctaacttcaaagaaataaagagtttgcaagaagaactgcagttcttcaaagtacgcaatatggatttccaagatgaatgtagtttctctctctgaggaattctgaacagtggtaaagtttcacaagtttatgcatatcttttgctctacatccttccc

SEQ ID NO: 435 - DNA, 300 bp, Homo sapiens
agtttttgtgattttatatcttttttcagatatttaattaaatttaatatatatttgcaatctataacaccatataaataatcatgataaatcaaaagatatattgtctggtccctggtctctcggagctgccaaggctcctagctgctgggaaagctgatgtatatgcaacttggaacataaggcagtgtttattgatgccattgatctttgtaatgggctacatgattgaaccttttttttatttcttctccttagtctttgataatgacttcacatctgtagttatctctttatatt

SEQ ID NO: 436 - DNA, 300 bp, Homo sapiens
gttgagttgctttttgctgcctgcagtattctagacattttataattagagataaagcttggaatttcctatgcaacatgttttgtattcagcctgctttcttcttcccacagttttggtctggttttgtttattagtttgttttctgcaggtagaaatacctaggaaagacaacatcatttgataaagtataaaatatgcttatttaggagagaatactttaaaaggcttatgaactcttgatgactatcctttagtttataattaacttatttttttttattatactttaatttctgg

SEQ ID NO: 437 - DNA, 300 bp, Homo sapiens
aatttcacaactgtgattacttgctgtgttggttactgatctttattttcatttacttagcatcttcattgataatcctgattgatgtagttttactttcatcatctaaatatctctagtttctaatttattctgtgtagagactttagtttcatcaaatataagtgggcatgaaattatatacctgagccaatagaagaactcaagacttttatttgccttaatgtaggatttaaaaaccaattcaaaaacaattgtttatatatgtgggaaaattcctttaagtttctgttgataggt

SEQ ID NO: 438 - DNA, 300 bp, Homo sapiens
ttggaataggtttcctagtaagatattaaatgtgtcatccaaataaatttttaggttacataaacactgatcttgaataaaatagctatagttctacctggaggtagagagtcataataatatcaaattagagctcatgtttgtgtgtgtatgtgtttgcatacttgtgcacgtgctggcttttatgtacaaaatggtgatcatcaaaggtagttgtcatcaaaaagtcatagattataaaagctaaaaaggacactgtattttaaagatacggaaacctaggcccagaaaaattagaca

SEQ ID NO: 439 - DNA, 300 bp, Homo sapiens
gacaaggtaaaagtagagattacattttctggagatattactttcatttatatctttataaatatggatagacaattttataataacagtgctaacactgaaaaggaaaagagtaagattttgtaatttataaataatccttatggggatgttattatttaactctgaagatgttgtttcacttttcattattttggtttcagtcactgcttgcagaatagtaatctcttagcatatgaagtcagcagatcaaatgcaagaaacaaaacaaaacaaaaaactcagaacaaaatcaagaag

SEQ ID NO: 440 - DNA, 300 bp, Homo sapiens
ctcaaagtttagcacactatttatttcactgtttttaatcatactcaggaagggttttagtgaagaaacaggagtgagattaatcaaaatagctcaaaatgctcaaaacttaagttatatattcaggaggctttaaattcccaccattttaaaaagtgttctttaaacctcaatttcgggtaccttgctgttccttgggtttgactgaggatcagtattttcttgccatttatcacacttaaacatagagcatccagaatcaataaactacaaagcagaagatttagagaatctatcttt

SEQ ID NO: 441 - DNA, 176 bp, Homo sapiens
acacaaattggggctaatgactctattttgaaaaacaaacaaacaaacaaaaaaactaaaaaacttctcaggtgttttatgatgaaagtctacttctctatcttccatactgtttgccatcttccttgatgattacatctgatgaccaagctcaggctttcccatacaaatttatt

SEQ ID NO: 442 - DNA, 468 bp, Homo sapiens
tgccaagtttgctttgaaagaatattagattttgtagagttttacattattaaaatcgtgagtggcttcttttgcttttcactgttgagtgtttttgctacagcctaacctatctttttcttattgcttgttttctttgtatttgctactcaatatagcttgtcaaatgtgtaattcatgtcatatacagtgctgtctaatataattcatgggtataaagtgagagagaaatgtaattctaaagttacttgaggtggaccactaaaaggtcctgagttcatttatttattcagcaaatatatattgtccaattgcaagctaggcatcaagtatattcaaggtggtaaataaaatgagcctgatcacttcttttagggcatttacagtgaagtggaggggacggacatgactcaatcaggtgaacacatcagccatataattacaaatgaacatgagagctgcaaaata

SEQ ID NO: 443 - DNA, 300 bp, Homo sapiens
cagccctctgggatacccaatggttcccatatgatgggactggagtgggcttcccatgaagattcccagactgatggggagattgaacatttctcctgctctcttgagttgtcaaccatgtgtttgcatttaggcagcagatggaattattgcaaatcatttactttataaccatttgtccccttatactatcttacaatctacttttcatataattgtgatgagttttctgctgttatggaaaattccatttatggctaaagcttttagtaaatgctatgaagcttgatgactctctct

SEQ ID NO: 444 - DNA, 300 bp, Homo sapiens
ctgaatgggaataattatgcattagttcataaaatgttcttatgagtttgtttagtcactagaaaggctagaatactgatgcttaaatataaaaaatatatagtttaaagagctataatatctagcagttcttttgtttctaaagctccctggacattgagtaacaaataagttaataaagcaatagtttgttatttgattttatatcagaaagcctaaatagtattttaaaaataaagcttccatatattcaatcttattggaaaaagtatttgaaaagctcaacctcagcttcccctg

SEQ ID NO: 445 - DNA, 300 bp, Homo sapiens
ccacacaaataaccatatcaatttatattgcactattctcaaccccacaaactccatttagacctaacagctatggacagtggccctaatttcctaggaacatgatcattttgttcttgtttggtgtctatgccaagctccaaatcacaaaaagctgttaattccaattaccttttgcaaaatccattttgaagtcttctcacagatggatgtatttaaaacacctagaaggttaacatcctttgtgaggcctcagctttgacttagaaaaagctcatgccacagtgtgtatgtgtgaac

SEQ ID NO: 446 - DNA, 300 bp, Homo sapiens
tatttcctaagagctgatatatgcccatggtgtctcactgcagggctggtgataaatgatgaaaccatttagtgcataaactcatataacctttcagcagaatcaataatttagttgcaatttagttgcatacctaaaacaatgcaaggttgaagaaccctgagaagagtggtagctcctgatgacagaaataggagtctcaggtattcttcttttgtttcccaagtggtatcaagcatgtgtctgactcactggtgctattttacattgtgaaggaagtatggatgagggaaggcaaaa

SEQ ID NO: 447 - DNA, 200 bp, Homo sapiens
gttaattcatttatcagatttgttgaatacctgttatgtgcactggatggcaattggtgccatgttgtatatacattggacaaaggcaaaattctgtcttgggatgcttaagtatagtgaagaagaatgacaagtgcaaaaatatctaattccaaagctgagagaggagagaaagattatttaagttggtatggtcagat

SEQ ID NO: 448 - DNA, 200 bp, Homo sapiens
agtaaaacagtattttaactaagctttgagaaatagatagaattctacttggaacattgaggaggactccatggaaaagtaataaaatgaatgaagaccagagccaggctggaaaaaaatctttttaatggaatagcagtgagcaatgcagaaaagctagagatcatcttactgctgtgcactctaaatattccccatgg

SEQ ID NO: 449 - DNA, 300 bp, Homo sapiens
tcccgtccatgtatatctcttttgacaattctagtatttatatttttctttctagtagttattgctatttccttctgagactgcatgttccttaaacaatgctgttccccaagattcagtcattggcccatgtaatattttaaggtatgaagacacctgaaagatcataagatatctcctttcatgtcttaactatcttctatttgattatctctcaatttccatatttagttcccatttctacttttagtcacagaactctaaccaagtgcttgctggacattcataacatctacacaa

SEQ ID NO: 450 - DNA, 300 bp, Homo sapiens
atttcccaaactagatgcatccattattcttcctcatctttaaacatactgctacatatcctaaatattttctattatatttactgcctcagctatccagttgcctaaggcagagccctgggaaccttcctcagctccagactcatcatccctcccaacatctaaacaagcaacaagtgttactgcatgtatttgtgggcacatatttctgagtcctcatctcagcttgacttccctttccaccaatgccctggggatcaccttattttttctccccaagatggttctcattaaaatata

SEQ ID NO: 451 - DNA, 281 bp, Homo sapiens
cttagtatcaaatggcaagtaaaaacagcccattcttgttttttcttctataagtgctaacctctctcaaataatacatatgtaggcagatctactttccactaaccagtatgaataatctaccagttgaaggtccaagaataaacagacagcatacttttattaggatcatttacagcaggttcaacaaagagactctttaaggagatgttggtagggtagaggaatccacaaaggatggcacagtacctggaactagcaacagcgaagttttcacccta

SEQ ID NO: 452 - DNA, 378 bp, Homo sapiens
gagggatgggttgcccatacctaggaaaaagcatcacacagagtgggctgccttgaaaagggaagttgctctctgggacacagctagaccctaaaaagaagaagacaaccagttgcacgcagtctcattttcctttctccatctgtctcctcctaggactccccactaaccaaatgcaagcaagcaggagggcaaaggaggaagaagtacatctgactggtcagccttccagggttcaaagccccccaaggtagggcagggaggagagtggagatggaggggaaatggtagatgtgctctgcagtctatgaagaggattgcatgttctgctacctcatttatccttaaaaaaatctctataatgtatcattaaacttt

SEQ ID NO: 453 - DNA, 300 bp, Homo sapiens
aaatttgtgctgaaataaaaagtggcttgtgttctctatgtaagtgtgaccgcctgcatattattcattcaatggtcatttacagcatactttataggtgtggaattctacagatgccttttctacagggacaaagttctgactagatgcacaaaggagatgaaaagaaccgtcaatgtctactttcatgttcctttccctctacgtggggaaaaacatcagtatatgaaatggcatttgaataacttaaagagaagtgttcacaagagcagaataactcggaacaggctttgaagccat

SEQ ID NO: 454 - DNA, 300 bp, Homo sapiens
aggtgtatgaatcatttactgcctcctcgggggtcccacaccagctattctgagattctgtcagagcacttagtgtattgtgttatttgtctctgtcccccactagaatgagagttccacgtggagagagatttttatcgtatttatctctgcatccctggaccctagagcacagttcattgcataccacaagtgtccagtaaatgtctggtgaatgaattagtaaaatagattgctgttatcattttggaggaagagaagggaatagaatgatggttttatatggacataaactacaaa

SEQ ID NO: 455 - DNA, 193 bp, Homo sapiens
ggatcttgattttgttgcttgttatttttaatgtctataataaattggtaaaacagtaaaactcttgaaaagcaaaaaaaaaaaaaaatccaaattctttgcccacttttttttctgctgttattttatttttaatgtaaaaaagccaactgctctttatcattcgttagaaatttgctccaaactaaggggc

SEQ ID NO: 456 - DNA, 375 bp, Homo sapiens
tgtacagttttcaatttgtgggtgttaatgactccaccacagtgggctcattcccttgcaagggcgctaacgggctgttgcttcctaagagacagaggattgagaggttttggtttctactcatagtctttggtttcttggctctgttattttccttgtttatgtttcttttaattaacattgagtttcttcattttatgccttgcttttcttctgtttgtacagtctgccggcaatgactccttgggtagcacttgttaattagggagaaatgatagcttgagggtacttcctgacttacttggtgctaggataaaagttgttctactgaagccgcattagaacaacttttatgtacctacctcaagtaagatc

SEQ ID NO: 457 - DNA, 302 bp, Homo sapiens
tctctctcatttttcttttcttaattacttttgaacttatcaggtgtaccacacaatttattaatccttatttaattacagactgtagcattctataattgtttctagtgttagccttgctctctaaacaagattgtaagtgcttaaagagatttatgtcttatactttcccgcctatactttgtagagtagaggttgttttattaagagatgccctacaaatacttggcttttcatcctgtataggtatgagtcctgctattaatagaaacaatgacatcattttaggatagatagtaaaa

SEQ ID NO: 458 - DNA, 295 bp, Homo sapiens
gtggtttatccagcagcagatccttccaatctgatattagttttatgcattttatgagcacacatattttcagaaagtcactggaagattttgcttctgttatatttgaaatttgaacaccaaacttccacattgtgaaatgtttgcatgaacacttttgagaactttagatgaaaggtgtagtataagtacaaagtatgcatcttcaaaaagcaaaatgaaaatgcaaatatttagaaatttcaaaacaaagcatgggaaattttgggtatattgcaaggccaaataattcatc

SEQ ID NO: 459 - DNA, 300 bp, Homo sapiens
aataaagttttcatatgtatgtactctcttctcaaagagaaaacattttatttgtgatcttagcatctctctcaaggagatgatatggaagttgagcgtctgcaatggttcgtaaattgagggaaggtttaattcccaccttgttcatttaagtatcatgtactatgataggctcaggggaaaccaagaaaaattcacttcccatgacctcaattaatttcaattatagtgaaagaaacattaaaacaaaattataatacattaagatgattattctaaaagcattcagcataaagtcct

SEQ ID NO: 460 - DNA, 300 bp, Homo sapiens
tggtgcctacagacacctaatctcgctggacgagtctgagaaggctgcatagatttacagggcaattgagggccagagggaggtctaggaaaatggaggacaggtgccaatgacagaggcataaaggaagactggcttgtcattgtgtaaaggtgtagcagaaacgcagcagccaaggctactcttggaagcagtggctccataatgcctggccttattgactataaaaaaagtttaaaaaaaatttattctgttgtcaacgggggaagagaattttgaagaaatggaatggcaaacttt

SEQ ID NO: 461 - DNA, 298 bp, Homo sapiens
tgcaaaccacactttgcgtgctctgcagcagtgaactcatttttaaaatatccttttcttgccatatctaaggtcccggccttagtttagatgcccattagttttgaggtttagaaccactggtttgcatttcaaaacgtaactcaagaaccatgccaatatttcaatggagatggtagcttcctcagaatttgtaaactgaaattctctttgtgagatatgtgttatttactgtagacttcatagctcatagactgattctaaattatatttgtaaggtaacttaggtgtatcccac

SEQ ID NO: 462 - DNA, 301 bp, Homo sapiens
tatctgacgtggagcaagtattgaaaactttctggtgctcagttttctcacttcttgaatgaggaaaatgaactacattattcctaaggtctctttcagttctaaaatgttatgttcaacaagagctactagattatgtcagtgaaacaaacataaaacagattattccagtagcaattgtcacttctcaaaacaaattgacaaaagtcatacatctattgtaacaacaattctccaggaagctaacctttgcctgtttttcataaggatatgtttactgcttttaactttgctttggaaa

SEQ ID NO: 463 - DNA, 200 bp, Homo sapiens
cattactcccaaccaacaactagcacctgatcttgtggacaggctgcaagcaaaccgcccccactgccacccacaagcctggagacctgggagttttttctccacacccccaggacataggcctgaagcaatgattgctgatgatatgatataagtaatccagcttcctctttcctaatcaagataattctgacatgtga

SEQ ID NO: 464 - DNA, 200 bp, Homo sapiens
ctatactagtccattcaagtagccaatatgcaaactttgccttgttatctaggacaagatgagcttgtgccagaacataaatctgtatgctgcttccttcacaaagaaatgtttctatgaaagaaaggtcagctgaagtaaatagtggacttactgacttagctgcaagcatcttatttcatcatggaccagtgacacag

SEQ ID NO: 465 - DNA, 203 bp, Homo sapiens
tgtaatgtgacttcaattatgctgaaaatggagatcttagtctcatcacgtacttttgttaaatcattgtattttaaggttaagtcacagggcaggaaacaccttctctgcaggatattgggtgtaaaataaagagaggctttctgtgtcctgggaatgttctgctaagaagacagtgatgataatagttaccactgaataag

SEQ ID NO: 466 - DNA, 207 bp, Homo sapiens
actgacatgtgaggaactaccaggatccctgctttacaggaagaagccgaggctcagaagtacacttgtctaaggtcccagaacaagtgtaagtgtcaggatttgaacttaagtttgcctgattccaaaagtttctgttcttaaaagctgtgttttgctcatgttttgatttatgtttgcccaaggtcttttggtccaactacaaaa

SEQ ID NO: 467 - DNA, 200 bp, Homo sapiens
cctcattaagagaaatttgagttcatgatgcatatgtaacttcgcagtaattgtaattagtacaatctgcttcttgaatttgctaacatatttgggaaaaatgttaccattttttatttcttttaaaacatttaatgccaaaaacttttcagtagagcatttagtacctctcacaaaatttcataagtggctttgattgt

SEQ ID NO: 468 - DNA, 201 bp, Homo sapiens
tgcagaattacatcaaatgattaggagcagacagttcatgaaactaagaacataatttacaacatttgtaacaaaaaagtatactttgagtctcaaagtatgagtaaaacctgaaattgaattttttgaagtcaactatctcctatatattaaccaaaatttatgaaaaaatatctatgacaaaataagacaaaagatggg

SEQ ID NO: 469 - DNA, 1000 bp, Homo sapiens
tcaaaattagtcatatgttccaacaacaacatgattatggaaactagtcttagaattgagagtaattgaagtttttgtttttactggtattaataaatggtattactcaattcgttgacagtaccagtctctgcaatatcttttgttggggaagggggagaggacctgttcgtctaattagaaacacatctacattttaagaataaaatattttacatatactttttgttattaaatctgcaaactctagaattggaagaaatagccttcataactcttcactgcaaaagttatgaatgtttgatagaattaattaaagcattcagtagaattagacttgtttggaaggactgtaggatctttggcaagaagtgtgttttatattgtttcagatgtataccattttctcttaaggtttacaagttaatcaataaagattcttggcagagctaagtacaaaagaacaatatgtatttcgcataccaaatggatctaagtcttaagtgttatttgatgtctcgaaatgtttggctttcaactttgtttaaatgaatagtgtgtatacagtgaagacaggctttacttagccatgcctagaccctctgtggattctctcataatcctcagttattgtaaaccatacttagtgagaccaaaaggatattttgttttggctgcatggtattattggaaaacggtaaaaattttattctttaaataatgtgtttttctattcagaaaaataatgtctatagagatagttatttcaaaatgtagttttcaatatgcacttgtgggtatgaacatgaacaaacacatgcagacacacagagtctgacgttatatctagaatgttgaatcctacttttctacttaacaggaatgtttccctatgtaacgaaaaagtctgtataatgtgtctctattatgtgtattatatgaattatatatcctaatttacttaaccattcttttattgtattggtcattttcccatatt

SEQ ID NO: 470 - DNA, 1000 bp, Homo sapiens
catacaaattattagggaacatctgtgtgcaaacatttttatttacattttggattatttacttagaatagattcccggaagtgaaactaccaggtcaaaggcttttcccaatttatttttcaaaaagaaattcccactgtattctatacaagtatgcttgtctcactgcccagttgctagccttacatggttttttttttaattttgttttttataaatagaatctcattgttttagtttgtatcttttggattactagtgagtttgaaatttaaaaacctgtcttttcaggcctttgtcttttagggtttttaggattttcttaacgattagcatcatctcttctctaaaaacgttatatttgttcgttatattgtaataggtttttttttgcttttagctattaagcttttaattatatacttgatttttaatttagaaaagtaaaattttcttcaatggagttcttttttaaattgaattctttgacatttttattattttgttcaaagaaccctatgggcaagtggaatcttacacttttattacctggatagcggataacattcatagtttgatatttaatctgtagcatatagttgacttttatttttggaatatccttgctttaaaactacaactaaaggaaggcagatggttagcttgttttctcatttcctgaaaatgtccaagattggaaccaatattatcagtctgtaatggaggttggcaatgtcaagatggtttgtatccatgtcaagatgttgaatcagtgtccaggtcattgctcattaaagatgttgctctttggataaacaggaaacccagaaaaaagattctaacaatttttgatgctacctcacattccttcgagacagtgcagaacatttcgttctttagaaaatattcaggtctctttctttgtgttacagcacttactatttgtctatttgtattattggcttgtgacccttttttggggggttacaaatacactag

SEQ ID NO: 471 - DNA, 1000 bp, Homo sapiens
aagatagaaaagaatcatcaaactatatgtaaaccacagccaaatgatgaattcatagtttttgctcaagtagagggattatctgaaagtacaaaaagaatttgataattgagaaatacattattttgaatgcacatttgaagtagctaaaaattctacgccacagctgaatgcactggcagtttgttaatcacatccataaacatgagtcttctacaattggagtgggccccacacttggaacatcttgaagatgtttcttctttggctgtgctaaattaagcatgcaaagaagttatattgtgttaacatttccacaatgaaatcttattggcacttcctgtataagtggctgggaatagaaattctcatttatgaatcaaaacactttgcctttttatttggaggtcaacctactaacctttggttataggataataccagcaattttattataaagtgtatttcagtaattggaactgtgttttgattatacaattggatagaatgtataataaaatgaaatgaaagaaatttctcccagaagattgagttaaaaatgttttggtgatgaaattgagatgatgtccagatttatagcatgtttggtaaccataacatacttctcgatatattgaattccatgtaaatgcttatttcttcaaaccctttaaatttcagagtattttctcccttctgttattaatcagttctattcatagtggatcttagaaaattatccagtgattaatatttctccatatttgtagctttcattactttatatttctgtttttgcctaggctccttgttaccagcctgttctaatgtcacaaaacttggcaaaccctacccaagaagggtaaggtttagtatctatgaattttgaaaatacttgatgagaaaagttgcttttaaattattttgaatcttattaataccaaaaatatttgaaaaagagaagcaggtacatttttccaatattcaaatttcattcaat

SEQ ID NO: 472 - DNA, 1000 bp, Homo sapiens
tataaatactcaaacctttttttataaattatactttaagttctgggatacatgggcagaacgtgcaggcttgttacataggtatacatgtgccatggtggtttgctgcacccatcaacccatcatctacattaggtatttctcctaatgccatccctccccttgccccccacctcccgacaggccctggtgtgtgatgttcccctccctgtgcccatatgttctcactgttcaactcccacttatgagtgagaacatgtggtgtttggttttctgttcctgtattagtttgctgagaatgatggtttccagcttcatccatgtccctgcaaaggacatgaactcattcttttttatggtggcgtagtattccatggtatatgtgccacattttctttatccagtctaatattgatgggcatttgggttggttctaaatctttgctgttgtgaaaagtgctgcaataaacatatacgtgcatgtgtcttttgcaatagcatgagggaaggagattggaaaacattgactcattgtacaatttaaatacgccaactttgtcaacttttattacaactggaaagcacttatggtacttattagaaagaaagtgtgtgtggatacgtatgtgtgtaaaaatatggctcttcttaaaaggaggcttacccagtcatttttttttgaataatagctgcattggaggtaagaaggtacctcaagacattttctctaattgtgcaggaaaaaacaaataaaggagatgaagactaggctgctgtcattctgtgccatctctgacatctatggaaagcctagaggcccaagaatacttcctccccagggtgctattgcagtatcttcagggtcctgagtctgaatgttcctattttatgtaagcattgtacccagaagaatgggtcagaacctctcctatggtctgaatgtttgtgtccctccaaaattcatatgttgaagtcctcacctccaaggtgattgtattag

SEQ ID NO: 473 - DNA, 1000 bp, Homo sapiens
gattgtaagtttcctgaggcctcctaggagtgcagaactgtgagtcaatgaaactttcttcctttataaattacccagtctcagatatttcttcatagctgtgtgagaataaactaatactactgatttctattttcattaagctgtggtctgaaagtgtggttggtatgatttccgtttttttgaacttgctaagaattgttttatgacacattgtgtggttgattctagagtatgtaccatgtgcagatgagaataatgtatattctgttatttttggttggagagttctgtagatgtctgttaggccaattaggtgaagtgttaagttcaggtctcgaatatatctatgttagttttctgcctcagtgatccatctgatactgtgaatagggtgttgaagtctcccactattattatgtggttatctaaatctctttgtaggtctctaagaacttgttttatgaatctgggtgctcctgtgttgggtgcatatatatttaggatagttaggtcttcatgttgaattgaaccctttaccattatgtaatgcccttgtctttttgatcattgtcagtttacagtcaattttgtctgaaattataatacaaacccatgccttgcttggtataattttcttcattcctttactttgagcctatgagtgtcactgcatgtgagatgggtctcttgaagatagcatacagttaggtcttgtttcttcattcaacttgccactctgtgtcttttaattgggacatttagcccatttacactcaaggttaacattgacatgtgtggagttgattctgtcatcatgttgttagctggttattatgcagacttgattgtggagttgctttatagtatcagtgatctatgtacttaagtgtgttttcatggtggtgggtaatgttcttttcttttcatatttggtacttccttatggacttcttgtaatgcaggtctggtggtaatgaattcccttagcatttgcttc

SEQ ID NO: 474 - DNA, 1000 bp, Homo sapiens
ctgaaaagattatacttctcctttgtttatgaaacttaatttagccagatatgaaattcttggttggaatttcttttctttaagaatgttgaatataggcctctggcctcgtctggcttgtagggtttctgctgaaaggcctgctgttagcctgatggaatttcctttgaaggtgacttgccagccgggcgcggtggctcacgcctgtaatcccagcactttgggaggccaaggcgggcggatcacctgaggttgggagttcgagaccagactgaccaacatggagaaaccccgtctctacgaaatacaaaaatacaaaattagccaggcgtggtggcacatgcctgtaatcccggccctggggaggctgaggcaggagaattgcttgaacctgggaggtgaagactgtggtgagctgagatcgcttcattgcatgccagcctgggcaacaagagcaaaactccacctcaaaaaaaaaaaaaaaagacttattttaatgagttggactcagattagctaataaaaattgcctaagtgtgaaccttcatatttcctatgtatggggaatgttacgaggtatgctggtgggaacacaggagagcacatggaatgattatcccccacttgcagaatttcttgtttggctagaaagggaacatacttgtacaaaaggcataaaaagatgtttaaagaggtgagcaaaggctcagagagtaagagaaagtagagactacagaaatattccataaaggaagattcaggaagaagtgtgtcagaagtagagcaagagcgaaggttggatttgctgactactactaatccatttctcaggagcatgtgcagatgcacatgggaggttataatgtcggtatctgttagaaccctattctgttggccagaagtcaatcacacaaccccacttttctgctagggtggctgaaaaatactttacctgtgttcctggaaggaaagtgaggcttttttgagcatttaaccagtc

SEQ ID NO: 475 - DNA, 1000 bp, Homo sapiens
gatgccttttatttttttctcttgcctgttgttctggctaggagttcgagtattgtgttgaatagagtagtagtgatatttggcatccttgtcttgtgctggctctcaaggggaatgcttctagcttttacctattcagtatgatgttggctgtgggtttgttatagatggttgttattttgaagtttgttcctttaatgcctagtttgctgaaggtttttaaaatgaagtgatgcttaattttattgaaagctttttcctcatctatcaaggtgatcatgtagtttctgtttttagttctgtttatgtgatgaatcacatttgttgatttgtgtatgttgaactaactttgtatcccagggataaagtctacttaatcatgctgaattagctttttgatgtcctgttcgatccaggacatagtttgctagtattttgttgaggatttttccacctatgctcatcaaggatattggcctgatgttttctttccttcttctgtttcttccaggttttggtatcagaatgatgctggcctcataaaatgagttagggaggagtccctcctagtcagtttttttgaatagtttcagatagaattgtaccagtcagctctttgtatgtctggtagaatatgcctgtgaatctttctagtcctgggctttttctggttggtaggtgttttattactgattcagcttcagaacttgtcattggtctgttcaggatttgaatttcttcctagttcaatcttgggaggttgtatgtttccaggaatttaccctgaaaaattctaggttttctagtttgtatgcataaaggtgttcattatagtctctgagggttttttgtatttctgttgggtcgatggtaatatcccctttaccatttctgattttgtttatttggatcatctctctttttttttctttgtttgtctagctagtggtgtatcaattttatttattctttcaaaaaaccaactcctggattcattgat

SEQ ID NO: 476 - DNA, 1000 bp, Homo sapiens
tttcaattttttttgttttgcatttcaatttcattcaattctgttctgattttggttatttcctttcctctgctagcttttgggttggtttgctctttttctgtttcctctaggtgtgatgttatgttgttaaattaaaatcttcctaactttttgatgtgagcatttagcactataaactttcctcttaacactgctttaatattgataagatagagattctggtatcttgtatctttgttctcattcatttcaaataatttcttgatttctgccttaatttcaatgtttacccaaaagtcattcaggagcaggttgcttatttttcatgtaattgtatggttttgggtgatttccttagtactgatgaaatggtttggctctgtgttcccacccaaatcttgccttgagttgtaattgtcataatccccacgtcaagggtgggaccaggtggaggttattggatcatggaggtggtttcccccatgtggttcttgtgatagtgagttctcatgagatctgatggttttataagcatctggcatttctcctgcttgcactcactccatcctgccgccttgtgaagaaggtgcctgcctttcctttgctttctgccatgattgtaagtttcctgaggcctcctaggagtgcagaactgtgagtcaatgaaactttcttcctttataaattacccagtctcagatatttcttcatagctgtgtgagaataaactaatactactgatttctattttcattaagctgtggtctgaaagtgtggttggtatgatttccgtttttttgaacttgctaagaattgttttatgacacattgtgtggttgattctagagtatgtaccatgtgcagatgagaataatgtatattctgttatttttggttggagagttctgtagatgtctgttaggccaattaggtgaagtgttaagttcaggtctcgaatatatctatgttagttttctgcctcagtgatccatctgat

SEQ ID NO: 477 - DNA, 1000 bp, Homo sapiens
gtgaggcaggggtgttccaccttccattctcatctaccctgcgttgattacatttagagtcagcagacctagttcattgatgacaagaactgagccacgcaatgttctaaagaatccaggcagttttaggagcatgataaaaattcacaaccctgtgggaaatgacccttggaagttaactttaaaattaatgattttaaaattaggatttccttacatatcctagtccctttagagttgagcttagctttgtcctgcaaaactgaaagaatacatatttaatttttttggtattttctgtagcatggcattaaaattaataaatttaaaggaatagaagcttgacaagatgccttaataggcccaccaggaataatcacatagttgcctattttgaagcatagacataaaattaaaaaattccatccagataagtcacgaggctttgccaaagtgccctcttaaattgctccccttttgagaatgcactatttattgtagcattttgctgagcccttgggaatttctcttctgagagacttttaccagtatgaaaaatagcagcttttctaagttttggaatattgtcagtcttttttttttcattggttttccgattatcctattctcagaaataacatttattgatctcaaggagttaaacattgtcttgttttctctggttctgtattcttcacctttaagaccagatcccaactaagtaataataaaagataataatggctaagagtttttgagctttcctccacgtcagttattgttcccagcactttggtttcattctctcatttgatgtgatataggaacttgtaacaaccctatgagacaggtgcttcactttaaagactaagatactgacgcagaggttataaacctcccccacggtcacaaaatcatgctgctggactgagctcgcaccttccactactattaatacatggtaatgttgacatcttattgtaaatgttaaacaataaag

SEQ ID NO: 478 - DNA, 1000 bp, Homo sapiens
gtaaagggaaagaagtaaatgcaaaaaaatggtcaaagcaggagatgattttaaagagcatctggttcagtctccccttttacagctgagaaaaccaatctctagaaaaaagaaatgagccttttgattataaagcagactgcctaacaagtatcaagtcatctcacttattcttctctgtcttccatgatcacagagttctgaccatgtcctgtgtcactctcaagcagagattgaaaatgacattcgtcctttacttgttccaaggaagcaaacattttatagtttgaaactgtttctcttgcatttgctttgcaagaggtttgcagaagttaagcctcatggagtcttctctccttaacttaagtgagtggattgcttattgctcttctttgcctgtaaattcatgttgattagacagtggtggggtggagggctgatgggtctgtgtttggttggcaagctaactccagcatcctataattactacattttcaatctggtgcatagttctgagttttgtacatccttatgtggctctacactctttgaggttaattttggccttggatggtgcccttttaaaggcagggtaatagcaacacagtgtttttgcttgggaaacgctctgtgtatgggcttcttctcttggttttaagtattaacaaggtagtaagtatgaaaggtgctgtgtttggagtctttaaatggacttggcatttggcttgtctacaatctttcaggaattttaatcctgatattcagatttgagtcacacacctggggagtggtgaccatagctcttccttacccctccagctccacttctgggttagcatgaactgaccactgtaacctgctctcaggctctacacaaaggtgcttcagaatctgcctgtggccacttctgtgaaagggcatggtcacagtcaccgtggcatggatagaaaactggagagcagcaggaggagcccagggatagagagaggaggcctggatg

SEQ ID NO: 479 - DNA, 1000 bp, Homo sapiens
gtgttcagtggctggggcagtgcattaactatagtctgcatgtgagaaaaacagcaattggcttttcactagtatttgtcattgctctatcctaatgcattcaacattttcctattgtgctatgctccactgtatatcacattttacctatttgattccaaatttactttgtggtattaggttttaatttagtaatttacatacagcttggaaaagtgattccttgaagatattgctttgtatctacatgataattgacactatttgtattaatattaaaagcattaacctctttttcctagtggtccccaatttcattcttagcaaaataaaattacagattctgttttcaaagaaaatttgtatatgggatttctttccattccttatctaatgttaggatactgaagttaaagtatgcattttctgtttttatatattttgtctttaaaatatatgttcagttataaaagtaatatcaattccttaaataatttttgtaatatacaggcaagccgcaaaaaaagaacaaatattctagagttccatgaaagtcatcatattaaaaatgaaattttaagcagttggacttcacattatttcataagaattttcaactctaatgtatatataatgattctaccaagtgtgtcatagttcacttagctgtttcaaatatttttttctactaagactaattaatactgtgtggaatacttttatatatagaccatttccatacttgagttttttttaaaatttgagttctcagaggtagatttactggttcaagagacattttttaaacttaatattagtttgcagggagcaatccataaatccatgtttcctaatactctgcctggatttttttttctgtgtttggagcatcagatgagaagttgtgaggagaaacaatggaaaaagaagaaggaatcatagaatcattgctgagtgttgctccccaggttcttgtttgctaactgaaaggaatttgctg

SEQ ID NO: 480 - DNA, 1000 bp, Homo sapiens
ctgaagggaagacatgttgaacacttttattcaccctatattcaccctgaattctctccccatggccaagggacagtatcaagacttctgttgtttcactgagacaagtcaaattaagaaacacttgagtgtttattgtgtcctttgtagggcttatgggcatatacctcagcaaagtaggcgggcaataatttaggtcatgcccatttaatttcaaaggccagctttaatcttttgggctgattgtgattactccaaaaacggcagaaaacaactgagaagggaataccaggtccaggttacagttctatggaggttttgtgtaatcctgagttttcgctttgcaatttggcaccatgatagcttttgtattttctttcctctgttctactttttcccatcatggcaggtgaacttctcagtgtgcaaggaattatatgtagctgactcttccagggtatgagaggtgggctgaagctatcgggatagcagctggcttcagtagtgcttttagctgtctagacttgtgctttctcattgattttggtgtctgggcatgtcctttactttctaaatcatgtctgcatttaaatattttagaatattttatccagcattttttgttgtttttccccaaaactagtattttcaatatttctgtgagagaacagggagtcctttctagtatattgctggaaataaaatatgcaacctattctctacacaacagtcagggtgatcttttaaagtatactttagatcatgtcagtcccctacttaagaccttccacagcttttcattgctcttagattaaaagcaaaaccctttatgttttctacaaatgtctgcatgatctggctcctaagaatcttctttcttacccactctttctcctgctccttaacttccagccacactggccctctctgttttttgaactaatggagctcattcctgcttggggcctttgcacttgacattctttctgcccatgtcctg

SEQ ID NO: 481 - DNA, 1000 bp, Homo sapiens
tcattgatgttgttatctgaattcatgaagtgggcattacattgttttaaacaagaagtatacacaattgcttcccaatccactctcctctcaaaacatgtactgatacatgcatgtatatttttgccacccttaaaaattcactttgtaattactttaatgttaatgtagaaaagagacacgaaaacctcaaaaagatttaggatttaggatttacttacctgctatataaaaaaaatcagggtctatcagctctgttggaaagaatggcttgagaaaactctgctttcatcatttgaaacttttattttgggattgtgtttataaatttcagaaagagtcctcttaccttcttccagcccaagtaagtgattggattgacgtttgtattcatggactttggcttgaaatgaaatcttttaattctgccttagatagtaaatgccaacagtttaaagtggcatgattcgatctttaaatttgccctactgatgaatggtgcaaataggaaaaaggaaaataaaaagtatttgctaccttgagaaatacactcagtctctatttgattttccttagatgtgggggtctgtaattgtaagatctgtttttattcatcgtaactaggaaagcctcaacattttaattaacaatagtaatataaattacattagttttatttcagttagaatttttttctttcatgtatttaatacgaaaatatccatgcaagagttccttcagcttaagtcagatgtgttcagtggctggggcagtgcattaactatagtctgcatgtgagaaaaacagcaattggcttttcactagtatttgtcattgctctatcctaatgcattcaacattttcctattgtgctatgctccactgtatatcacattttacctatttgattccaaatttactttgtggtattaggttttaatttagtaatttacatacagcttggaaaagtgattccttgaagatattgctttgtatctac

SEQ ID NO: 482 - DNA, 1000 bp, Homo sapiens
tgataattgacactatttgtattaatattaaaagcattaacctctttttcctagtggtccccaatttcattcttagcaaaataaaattacagattctgttttcaaagaaaatttgtatatgggatttctttccattccttatctaatgttaggatactgaagttaaagtatgcattttctgtttttatatattttgtctttaaaatatatgttcagttataaaagtaatatcaattccttaaataatttttgtaatatacaggcaagccgcaaaaaaagaacaaatattctagagttccatgaaagtcatcatattaaaaatgaaattttaagcagttggacttcacattatttcataagaattttcaactctaatgtatatataatgattctaccaagtgtgtcatagttcacttagctgtttcaaatatttttttctactaagactaattaatactgtgtggaatacttttatatatagaccatttccatacttgagttttttttaaaatttgagttctcagaggtagatttactggttcaagagacattttttaaacttaatattagtttgcagggagcaatccataaatccatgtttcctaatactctgcctggatttttttttctgtgtttggagcatcagatgagaagttgtgaggagaaacaatggaaaaagaagaaggaatcatagaatcattgctgagtgttgctccccaggttcttgtttgctaactgaaaggaatttgctggctgaagggaagacatgttgaacacttttattcaccctatattcaccctgaattctctccccatggccaagggacagtatcaagacttctgttgtttcactgagacaagtcaaattaagaaacacttgagtgtttattgtgtcctttgtagggcttatgggcatatacctcagcaaagtaggcgggcaataatttaggtcatgcccatttaatttcaaaggccagctttaatcttttgggctgattgt

SEQ ID NO: 483 - DNA, 1000 bp, Homo sapiens
aagatgatgaggatgaagaccttttgaatgatatggttccacttaatatatagtaaatatattttcttttccttatgattttcttaataacattttctttcctctagcttactttattgtaagaatacagtatataatatatatataatatacaaaatacgtgttaattggctgtttatagtattgctcaacagtagcctattagtagttaagttttttgggagtcaaaagttatactcaaatttttgactacacgtgggttaatgcccccaacccccaccttgttcaagggtcagctgtagtagattaaaaggtttttcatgtctggaaagattctctattcctggactggttcaaggaacttagaggtcaatctgaattccaaggagtgaaggtactaatggtttgatatccaggtgtacatggccctctgccaggagactgtagggaaagtagattatcatcatccaacttgtccagttgtgcagccagatattcttgctgacaatgtgaatatttacctatgaatactagagtactagtctaatgtgcaacaagatacatttgcaaagtgcagggaaagtataatagtcaggtgaccaaaggtcacagtgaccttccttaggtttggtctcctgactattacaccttgacttgtttttactttttacaggatttttacagtgcagtagtggcacataatttcttgatcttgtgtgtttctgttacggtaaaaataaaaacaaatataaacagtaacaaagaaacagcttccaggaaacttattagttattcctcctatgttacatggcatttccataattctcatctgtattaagtttgctgtgggaatggcaatcatagtatatagcccttaccaccagcactgccttctcacatgatttattgcaaattggttatattggagagtggattctgccaaatgggtagcctaattagtagtcaaattgttgttttctctagtgatttattatcaagc

SEQ ID NO: 484 - DNA, 1000 bp, Homo sapiens
  misc_feature 129: n = A,T,C or G
tattaatttcagtgtccaacagaatgaaataaatgtcttggactattttttcaatgacattaaaaaatgaaaactaacccagagaccaattacattgaaaaaaatttatttgagccagaaaaacgtccnagtactgggcaacatcccagactaaaaatggttcagaatgccccaacctccaattgtggtgacttagatttataaccagaaaacaggaaataacatatagagattaccttgttggtgcaattcaatgtttgccttatgtgggcataatttggcagctttcagcctgggaattgactgaggatttggctgctatgattggcggagaaacagttgcttggtaacaagggtatactcctagattacagcttgctatgtatggagactgctttgagccaaactttactaccaagtaaagaatctgctgtgtgccaaacttaactttaacacatctcagcattggtctgaaaatcagttcacagtatttgatagtgtgccttgccattttctgttacacactttgttccctgtatgaacttctgtttactttgcactatttctgtatctgctactttggaataaaagtagtcagtataacttaaataatgtttcttaaatagtcaaatgagagtgatgattcaaatatacctcctttcccccattttctttctaaattattcacctctaaggtaattataactaagtttcaaggtttgatttggaacatttttcatatttctgtcacttagttcatagatgttcatatttctactgtattatcttatcagttattaagattcttgggagagtatatatctttttataaagctttccagaatagttaccatgatgttcattcttataagtaagcattcatgcagtagctgcttaaatatgatcccgtgaatggtggtataaaaaacatagtggattagacactatgtgctctaggagatggaaattgaagaccctggcccagtgaatttctcagcaa

SEQ ID NO: 485 - DNA, 1000 bp, Homo sapiens
aaattaatttagtattcagtgcttattcttcagattcaaatagtacagaagactataatgacaagcatactgagccagggcatcaggactcccactggaaggcccagagtagccaggtcccagcaggagggagaaacatgaaattgaactgtgagataggacaggagaaatttcagattagtatgactgggcagcttgtggaaactcatattctattaaggagtaggaaagatgacctagtttgggctattaggatgaaaaaaaagaaaagaaaatgttttttcaaagtttccatttggtgtataatttttttttttttttgatatggagtttcgctcttgttgtccacgctggagtgcaatggcgtgatctcagctcactgcaacctccacctcctcctgggttcaagtgattctcctgcctcagtctcctgagtagctgggattacaggcatgcaccaccatgcctggctaattttgtatttttagtagagatggggtttctacatgttggtcaggctggtctcgaactcctgactccaggtgatctgcccacctcgccctcccaaagtgctgagattacaggcatgagccaccatgcctggccgttgtagaaattttattgacaaaaaattcttcttgtaaattgctttttatctcccaacaacaacaaaaaaaaattggttctccaaagagactgtgtatccacccacccggaaggcatgttcaccaggacagagtgatctcaaagattaggatgagtggttggagcttggatttaattttctcctctcttggtctggtgtgacactcacttatttccctttttcaaaagttctagaatctgtttcatttaagagattaaaaaacaagtaactgataaaaaaattcagatattcatgcccttttaatctcttgacttgccaggtaaatctcctggttgaatttcatgtgcatgtttatttcatttgcatgaagtttaaattctcccagggctgtac

SEQ ID NO: 486 - DNA, 1000 bp, Homo sapiens
gctgcaactatttttgcagattcttcactgcacaagttggctgggctgcagggggtgagtaagtgcagaacggcagccacacttggcttggccaagccatgcagtgtgatgtgagtctgtgccagcccagagggagggatatctttttctctttcacacaaagggctagtaagtggccttgattgccactaaggttcattgacatcatggctaccctgagatgtgcctggtacagtgcttcatgcacattgttatctggtaaatgcttttgatgatggtcctacatatatttcaattcagtgggaacattatatgtgttttacttagggagaacttcaccccaagtgccttatgcttgaaacaatagtggtgttttagcctttgaagacacttggtgtatgatctgactttcttcttctcttgatctttggggcagttatacttgagggtaaataggcctcaaattgcttggtgtcctacaaataaacataaagagcttagcttagatataaaaaccctgagaaatggggaaaaaaagcatgctatctgcacaaacaaggggaaaggcagtaggcaggaacaggatggaagtccatggaagatgctgtgattcctttcctgctcagctcctcaagtcctggttcttgttttgttgaagaacaagcagaaatagtgggatttgggatttagagttctggaaatggccagatttttttttttttttttttgagacagagtcttactctgtcacccaggctggagcataggggcatgatcttggctcactgcaacctctgcctcctgggttaaagcaattctcctgcctcagcctcccgagtagctgggattataggcatgtgccatcatgcacgaataatttttgtatttttagtagagatggggtttcaccatgttggccaggctggtctctaactcctgaactcaggtaacccacccgcctcagcctcccaaaatgctgagattacgggggtgagccacc

SEQ ID NO: 487 - DNA, 491 bp, Homo sapiens
ttatcatttctactgcagagaaaaagcagaccatttccaaagggcagcctaagggagctggaggcagagagtatcagagagtgtttcagtgctgataaccaattttatggatcagtcattttaattaataaggagaatgggggaaagtgatgcaaacaatgtaagtcctggttggcatttccttgaatgttgaatacctcttacttttcaaagggtaaggaatttggttagtgactggaaacaggcagaattggggttgcgctaaactcaaccagaggtcacagagtactgttggcaaaggttggcctctttttcttgctgcacgtggctcgtatttaatatactactgcagaataactttgatctctctgcctttagacagaagtcaccaccactatccccctaaagctattggctagcatttctttaaacaagcaggctgcacagagctcctcatgtgactccagcaggggaggaagggaggaagttgc

SEQ ID NO: 488 - DNA, 487 bp, Homo sapiens
tgggttggacacccagagctaagaagtagagagatgtaggtagaagggccagccaattggcagcagtaggctgcaacagccacacacttgccccgggaagtgggaaataggagggatgctagagcttggtttctaacatggcaaagatctatgagagcgagagagaatagtaatggagtaaaccaaaggaagaaataagatgcctccagagggatatggcagctttaaaacatggcctcaaaatcctttgacactccttccatcaagaaatggggtctatgtctcttccccttgtatcctcttgtgactgcttgaccaatgggatggggtagaggtgtcagtttctggtgcagaccttcagaaatgggtcgcttctactttgtgtatcctgagaggcttgctcccagaacccagccaacatgttgtgaagaagcccatagaaaggcccgtatggagaggaaactgcagtcagccatgtgtgagagtc

SEQ ID NO: 489 - DNA, 483 bp, Homo sapiens
ttgccaatttcagtttgtaatttgttcaaacttgcaagtgataatgtggtactttattttgaggagcaaaacaataaaaaccatcagtacaaactcagggtatctttggtcctagagatctctattcacaatgattccttacactgtgtgaagtatgaaagttctataaaaagatttctccacaattcattttataatagtcctgtcagtaggttttattaactctacttttctgttgaaaatatggagtctcagtaattgtgattgagttagtcatcccaggttataaaaccaacagtttcagaagggtcttgaatgaaatatcttctgcctttcaatccagggaagtttgtactatacctcaacaaggactaaaggtaagggctaaacatggaacatcacagctatcaaattgatgagagaggccttatcacttcttaggttgctcaagaggatgatgtgagcagaataatggcccccaaa

SEQ ID NO: 490 - DNA, 412 bp, Homo sapiens
aggtttatgttctcatctctggaatctttgaatacgttataggacaaaggagagttaagattgtggatggaattaagattactaatcagatgatcttataatagggagattatcctggattatcctggtgggcccaattcaatattttaaaaggtaggcaggaaaagagagggaattgtgactaaggaaactaaggggcagtagtcagagggatataacattgcgttctttaaaaatggaaaaaagggccacaagccacagaatgtggatgatctctagagctggaaaaggcgaggaaagagaatttcccctagagcatccagaaagaaactcagccctatgaacctcttggttttagcccactgagactcataggacttctgtcctatggaactgtggcatgataaacttt

SEQ ID NO: 491 - DNA, 1000 bp, Homo sapiens
ggccggaaaatgggctaagagtcagaatgacctagtgttcgtctttgtttccatacaattcccaacctaccttgaggtccacgtctgaatttggctgttgaaggctttaattttcaaggaaaggaaaggtctgcctgggataagtcggccagcaagtcagcagaagcaagcctaagactaaggaaacacagatctacctgttgtctaaggccaagctggcatagatacctaactctgggtcttctctgtctgggggcaaaatctccagccttgaataggagtcagacctgttatggtggctttcacctgaagtcccatctactcacgaggctgaggcaggctcccttgaggcaggatcccttgagcccaggagtttgaggctgcagtgaactatgatcacactactgcactctagcctcgacaacagagcaagaccctgtctctaaaaagagaaaagaataaaaaaaaggagttaaaagttaatatagaaccagagagagagggaacaggtcttctcagatggggtaatccctggtttgactttccttctagccccatgagaagaagacccgtaagaaaataagggaagaagccaaagaaatatgtggcagggtctttcccaggtggcagcagcccaacccagttcaccttcctgacttcataaaggaagacacaggaggcttttcttatttttactcctctcattagactccaccatctgcaaaatgttgtctaataataaactctcaggatcatctattttaacatatctgctcctttgtgggaagagtgagtgtgaaaatttgggaacatgcgcagtggataaagctgttattttatgcaaaacagaaaagagcagtgccccctttgggtggatgtagccctgtaccagtgcacacagcttggtattctcaaagaagcccacaaaacaaccaaggaggctgttccagctgggcactagtagctgattctcttggtaaccgtgggctgggttttagct

SEQ ID NO: 492 - DNA, 1000 bp, Homo sapiens
  misc_feature 939: n = A,T,C or G
tcacatgcctgcttgagcggagtacctttgtgtggtaaacaacctggaccactctacatggtcccctggtggtggtaatgggcaggcttaagcggtgtgatattggttagggggctcaaacaactcatggaatgggcacctaagcaaggtagagagatgcagagcggggagggaggagttctgaaggggagtttggcttgtttgctttttttttttttcttctatcttggcaccctttattaacagaacacagtgtagattatgcattgtattttgaaaaagaaagagaaataaaaggcgtaatctttgcttttgagatgttttcagtctaactcagcaattcctttccctcatcctttctgcctcactacttattacatttacttctagttcttcctctttaaattgaaaaagcagaggcaaaaccagacactgtgataatggaattttatgttgtggtctttgattacacttcccttccaaagcttcaatatttcacattgttaataataatgttctttgtaggaaaaaatccttaatttgaaaatgttgcagatggccttttatcaggagctatggactgtcaaaataaatagatataattatgaaccattgttgttgaatgggccatcttaaataatagcagtcaagtttccagaaattaaaaaaaaaaaccttacattttaaaaagacctcagaataattagtggtctctggttgattggttttcaacaagttattcagcagatggaggctgtcagatttctgctggtacgattatttttgtaactcagtggtggaggggggtggtttatgcaactcagcatcacctctttgttgaattggatttggtttaagagaatcccaccgcacctgtacattaagatggagcatgaggaaggtcttgggaccgagccatttgaagaaaatctaggctcnggtgggtcactttaggagtattagtatagccttagacattagctcttggaactaccctgaa

SEQ ID NO: 493 - DNA, 1000 bp, Homo sapiens
  misc_feature 135: n = A,T,C or G
gcaagtgagttttcatgttgaggcatggggcaatgcctgggttggatggctttggaaggtggcaatgtggggattatagccctgcaaggacagggagcttctgtccaatgtggttacagggtgcctgataataanagcataagggacataccatgaaggaacaggggatcaacaatgacagttttaggactgtttcacagctttgttagataccaacctggtttataaacatcccttaggagtcttcctggatattaagcatcaacataagatcacctggaatgaagccagttgactgctccaaacgtgatcttcaaaactgggtgcccttatgcagcaaggcttgtgtgtattgtggaaaactgctccaggacattctgaagcgtgactgtccactcggtggtgcaaccacggactgccagaagctactggcctggagcaactggcctagcccatagaaagcaggaatgaagcagctcttcgtggctgtaggtgtcccacggaacaagggtagagccaattactgaacacctcccacatgccaggcaccatagtgggcatttcacacacattgtctcatgtaaactcacagctgttccatgtagtagacattactgccttcacaacacaaatggggaactgcaactcagagaggaaagaagtagaggtgagatttgagaagatttttggatgccaaaattcgcatgtcttcccatgtatgtcgcacaacctccaggatgttctgcagatatcacttgctgttatagttcaatgttctctacccatgggcatttagggtggaattattgttctcacattattgctatttcaggcattgctggaacaaagaaacaatcaccaccagtggccccatctactctgagagagagcgtttgaagtcatcagtcgtattttccagctgtcagggttccaatttaagttttatgttggatctttttctctttactcttggttgattggagttataatctgtgttttc

SEQ ID NO: 494 - DNA, 1000 bp, Homo sapiens
  misc_feature 321, 505: n = A,T,C or G
ttcccatttttgggtattcacatttagattttattgagattcatttcatagtgctttaaaaggttaacaagaagcctgaaactctctgggtttcttattaagatgcagcagggaagaagacagagtgtttcagtttattgggctagacatatctgttgattgacgcagatgctgcaaacatgttctgggaaccatttcaatgttctgtaataagtagcacattaatcaggactgggcaaactggaggggtctcagcagggttggagtttcctgggaagtgcctattaagatgaagaattagccagtgctcacgtttaacangtagactcctgagatgcggcctggagggagatgccacagagtgctgatcaacattggtgcggatcactgacgtgtgatcactttcacctgtacatcattatcagttcaaagcctccccctgccccgtgggcttgccgtgagagggaggctccatcctcttttttaacataagggcaggagggtntgcacactccagagatgtgtgtcatttactctttgcagcttcagcaattgagtagactgaagaaagatgttcgtgaaaggtggacttttctttttatcatcatttgccctttttctagatttttcattgtgaagtgtgttatatattcaagactttatatcatgtcatcaaaagcctaaccataaaataagtcttgagtatgcccactgtactgtatggagcatgaagccggctttttgtgcagtctccttgttggaaccactccttgaaatttgggcttatcatgtcctgacttttctggacagttttaccacataagatagtttgctaaacatcttccccgtatttaaaatgtggcttttgtgtaataaagccctgtggactccatagcagtaccaagtttacaaaactaccccagtaccacggttttgtaaacagtacccctgtttgcaaaaactggctctgttttaaaatagcttagatggcctttatccc

SEQ ID NO: 495 - DNA, 1000 bp, Homo sapiens
catacactctctcctttccacctccagctcatcttgcttggcctccgctttttccgtcacatctcatctcctggcctttttcattcctcatccctaccttatttccaatttcagtcacatttcggtgaacacactgctcttggtgcttacagcaaggaaggctagttgtgttgaatttatagtactttttcaaccagccattgggaagcacatggaactccccacactcatttttactgccatttttttttcaacataatttacaagaaatagaaggaatgtgtattagctaattgtgccacgtggtcctattttctcagcaatacttatttttattaatgcagctgatagaaaatgaggcaaattttcatcaaaaagcttgctaatgtaaaactgagagtaccaggcagcctggaataaaataaagaaacacaattgtaatattactattttgggagttttacattaaactcctacacaataatcaaaggtggaagtgtgatcataaattttagctggaatttaggaatgtggcagcaactctggggcacatttacaggaaaatcatagactcaaatggaatttgctgaggactatatatcaatttgccatcagagtagacagtattagaaaccctggactcttcccattaatcattgtagatgtggcatctcaaacagaagagagttatggcggttataaatcgtgcactgagagttgttttttactttagatagagaaaacagttgaaagagtttgggatagcagatgtattgtctctggttcctccttttagttttaaaaattaattgtgcatttcagaatcctgtactttaaatatttagacatggcaagttttaaaaagaagatatgtagggcacatacttctcatccactgctgacaggcatcaggaatggggtaaatttggataggagatgcttatccattctatgtcactgcagatatgaaattttgtcttattgttgttttgatttagca

SEQ ID NO: 496 - DNA, 1000 bp, Homo sapiens
  misc_feature 606: n = A,T,C or G
gaaatatctttattattttttttccaatgatgagaatggaaatgttgtaattagttaagtctgaaactatgatttaggaaagaaaaaaaaaagtgcaagatgatctattgcacagagagccacccagagcccatctgttggatagaataaggaacccctgtgggtgtaattggggcaggaagaaggggcaggatatggtggaaagtgcttgggttttgaagcccaacttgtttttgagtccacgttctatgtttttcctttgtgttcttgagcaagatacttaacttcaataatctatgatctatacattgggaataataatcactatctagaaatggtgttttagagattaacatattataataaccttggtaaagtatctggcttatactcagtagaagtatctgctttatacccagcaaatattccttttcaaatagatgtaggccactatgttataattaataaagcaataccataagcatttgaatgtttctgcacaatgacctatttgctgtcttttgttaaattttcttagttgggggagtgaaactcctgactagctttgggctggatatagcatagcggtgcccacctatgtggaanggtttgaagagtcctcgacagggccagtgacctcattgtccttcatagagccaaaaattgcgccagttacagattcagtcccctgagttttgaacaaacttccaaaatgccagatcttctattataatgcaagtattcttggtagttgagaatggaggagagttatgagagtgaggtgaaataggttaagctacaggttgcaaactcattccttgctcctcttgggaaaactggacagtcagatgacacattattgcctggctgcaattggctgcaaggggcagctgcccagttttgatgggatgcccactcctgataggatactgatccctttcaccttactcttggcattctttagacattttcactgttttcctggcccttgcaacacctg

SEQ ID NO: 497 - DNA, 1000 bp, Homo sapiens
taacattttcctagtgttcttttgaagacacgtataattgtagtcctattgtcctgagactgaatgtacagatgaacccagccatgaatggagaaaacctcaagaaaagtgaaagaaacaaaaacaagccaacagctccttcactgggataaaaaccctcagctaaaaagagatagttactctaagaattgtactgttttattaagttagtgacttaaaatattaatctttttgaatataatttggcatggggaatctttgggaagataaagattgtggtcaatataacacctatctagccaccttttttgcgggtggttgggtcagtagcagtggaacaaactagtatgtaaattgagatttctaggaaaggtggaaaatatctggggaacaccattggatcatagcttagttattgcagcaataagaaaaatatatttctaactttagggttaatttcactcacgttttccttcatttagatctggtttttaatccctgatttagagccgatcttttaaattgtcattttacttttttagagctaaatggtttgaattggacttaaatattcggaaataatgttaaaatgtgaaattcgttgcttttagtataaaataaatgtatgcattgaaaaattctttttacatggtgattactttcatatattgtgatgccttggttttatataataattgcaatgatgatgatgatgataatgagattagctaacacttatgtgatacttccctttgtgacatgtctgaatttcttctggttatgtcatacagtggtggtaataatacacgtgaaaggccaggatagttctagcccttacataagtttgctttatacttaagctagtcttttagtccgtttttcctttaaacatcataacctattttggttatagctaccagttgtaactattttcacatagatttttacagttaatggaaaatgaacccttctggaagttatcctttttatcagcaatgaa

SEQ ID NO: 498 - DNA, 1000 bp, Homo sapiens
attataccagtgcatgctttattacaacctagaatgagtgtgacttgaaaaaattagaacttaccaagttgcttgactccctctttgtccagtgcagcagttaatatctcatctcccattctctagggccagtcagcctatgttcaaatgtcagttcttccatgtattagctgcaaaactgacctggggaaaagtatgcagcttttttagttcactattctcatacgtaaaatggggtaatggtacctacttcatatgattattgagaagtttaaatgaattcctgttagaagcagtaagaacagtgtctctcccatggcaagtgccttatgtttttaaaataaatataaatgtctgaggctcattgccatcatattatcacagagcctgtatcaaggacatggaggcaatacctgcagtggccaagcatgaaaatctttgacagttctgttacttgacagctgtaagagctttggaaagttgcttaaccttagactagctctcctcattgtaaaatggaagtcagtcatagtgtctgctttgtgtggttgctgaggattaaatgagatgatatttgtcaagacttgtggtgagtcacaaagttcactgacatctcatccagatgggcggagaagaggtagcttcttagttttgattttaactaatgtgatcttcctcctgagcaaaccactgctgattagaaggaaaaataaattaaatgtctaagctgtcttagtctgatgtattgattttagataatgctctgtctctaggaaaaggtgctcagactttcagatctctgtgttccaggattttccaggtttctctccaagatgatgtctggtatgtaggggaggggaggggcttaggcagcctcttggtgggagagaaaagtctggacccataggcatagtcatggtgtccactgatcgcacttcaggaacagagaccaatgcctctggatggactctccacacccagcctttgctagggtgccatc

SEQ ID NO: 499 - DNA, 1000 bp, Homo sapiens
ttatttcttgttcgtatcacattacaatgtggattgggggtaaagtgggacacagcatgttccacaaagttattcagattcccaagctgtttttacctagttcattatcctctaaagccccagagtcttggatattaatttctctgaaggaagagtgtatgatagtgtgtccagaattggtgggctcttggtctcactgacttcaagaatgaagccgcggacgctcatggtgagtgttacagttcttaaaggcagtgtgtccagagtttgttccttctgatgttcggatgtgttcggagtttcctccttctggtgggttcgtggtcttgctggctcaggagtgaagctgcagaccttcgcggtgagtgttacagctcttaagtcagggtgtctggagttgttcgttcctcccagtgggtttgtggtctcgctggcttccggagtgaagctgcagacctttgcagtgagtgttacagctcataaagacagtgtggacccaaagagtgagcagcagcaagatttattgcaaagagtgaaaaaacaaagcttctacagtgtggaaggggaccccagcaggttgccactggtggctcaggcagcctgcttttattctcttatctggccccacccacatcctgctgattggtccattttacagagagctgattggtctgttttacagagagctgattggtctgttttgacagtgtgctgattggtgcatttacaatccttgagctagacacaaaagttctccatgtccacactagattagctagatacagagtgtcgattggtgtatttacaaaccctgagctagacacagagtgctgattggtgcatttacaaaccttgggctagatacagagtgctgattggtgcattcacaaaccctgagatagacacagggtgctgattggtgtgtttacaaaccttgagctacatacagagtgctgattggtgcatttacaatcccttagctagacataaagattctcca

SEQ ID NO: 500 - DNA, 1000 bp, Homo sapiens
gtccccaccagactcaggagcccagatggcttcacccagtgggtcccgcaccgggcggcaggtggagattcctgccagtcccgcgccctacgcctgcactcctcagccctttggcagtggatgggactgggcgccctggagcagggggcagcgcttgtcagggaggctcgggctgcacaggagcccatggtgggggtgtggggagactcaggcgtggccgcactgcaggtcccgagccctgccccgtggggaggcaactaaggcctggtgagaaattgagtgcagcagctgctggcccaggtgctaagcccctcactgcccggggtggcggggccggcctgccgctcccagtgcgggcccaccaagcccacgcccaccggaactcgcactggccttcaagtgcctgccgcgcagccccggttcccgcctgcacctctccctccacacctccccgcaagctgagggcgccggctccggccttggccagccgagaaaggggctcccacagtgcaggggagggctgaagggctcctcaagcacggccagagtgggcgccaaggccaaggaggcgctgagagccagcaagggctgtgagggctgtcagcatgctgtcacctcttaataggtggtttggaggttttaggaaccaggtctggatggggtacatatgacttacattcacattctattggctagaacttgtctcatagcctgatcagatgcagagggtctaggaaataggtgctgaaagaagggaacccatgcacattaatgagtaccattgattgctccctttcagtggcactttaaaggtttggacttccagttgtctcacccaggttgagtgcaaccacttaggcattcctaccatgtgacaaggtactggcatctagcttgatgtgggtctgcccaatggcaaatgattaccctaagactcaaatttcatttcccttcttcctgtgtcttaaccaaggagagattttaaaacgtataccagaga

SEQ ID NO: 501 - DNA, 1000 bp, Homo sapiens
ttttaatttaattttcttgattgctcaagggctaaaaatatgcagcccctatgcattagaatctattcatactcagtattgtacctctccacatttcacacttaacatttgacaaatgtagtaaacttacaacattttatttcaatttagtcatcctctttcttttattttctttttatttttttgagacagggtcttgctctcacccaggctggagtgcaatggcacaatcatggcttactgtagcctcaaactctggggctcaagcagtcctcctgcctcggcctcctgagtagctgggactcagtcatgtgccaccacacctagttaattttttatttttatttttagtagacatgaagtctcactatattgcccaggctggtctcaaactcctgggctcaaatgatcctccctgctctgcctcccaaagtgctgggatcacaggcatgagccacaacacctggcctcatctccctttctttgtatggttattgtcatattcattattttaacatgtcataaccccaaccttagagtgttttcacttttgccttaaatagtagtctttaaggaaattctaagaaagaaaacatactactttatatttagtaatttacttaacatttccagtgctctttttctttcttactgtagatctgaatttccatctggtatcagttatcttcaactttttgtatttcttatagtgtaggtctgctggtgattaattttctcagcttttatttatctgaaagtgcctttattttcttcccatttttgaagaatatttttgttggttgtagagttctgagttaacagctttgttttcgtttttcctttcagcgatttaaaaattccatgccattggggttttcagtccccactgtttctcataagcccatgatcattcttatccttgttcaactgtacgtaatgtgtgtctttcctctggatgcccttaatatttcctctttatcttggatgtgctgcagtttta

SEQ ID NO: 502 - DNA, 1000 bp, Homo sapiens
tacaatgtgcctgggtgtggttttctttatatttattcttcttggggtttgctaaacttcttggatctgtttgatcgttttgaaaagttttcagctgttattccttcaaatatttttttctggcccattctcactcgcttttctttctaggattccaattacatttacgttaagactatttggtattgtcctacctattcctgaatcttagttcatcttcctgattattttccccactcttcctttctaagattaaataatttctactgatctgttttaggttctcttttcttctgccatctctaatcagctattcagacctgtccactaaattgttcatttttatttttttttagttctagaattttcatttggttattttctctgcctagactcctctattcactccttgagatcatatttcctgtcattctttggacatatatatttaaaattctttaacatatttacaaaagctgctttagattctttgtttggacatatctgggtaattttgagatttgtttgtatttactgcttttttgcttgcctatgtatcatattttcatttttttaaattatgctttaagttctagggtacatgcgcacagcgtgcaggtttgttacatatgtatacatgtgccatgttggtttgcttcacccatcaactcatcatttacattaggtatctctcctaatgctatccatcccccaccccccacacccccccaacaggccctggtgtgtgatgttcgccaccctgtgtccaagtgttctcattgttcaattcccacctatgagtgagaacatgtggtatttggttttctgtcattgtgatagtttgctgagaatgatggtttccagcttcatccatgtccctgaaaaggacatgaactcatcctttttcatggctacatagtattccatggtatatatgtgccacattttcttaatccagcctatcaatgatggacatttgggttggttccaagtctttgct

SEQ ID NO: 503 - DNA, 400 bp, Homo sapiens
aaacaaaaaacaaaacacaaacaaaaaagaaaggtttgagctaagaacttgcaggagacaaggaaattagtcaagcagaaggatatctgggggaatggcatgcgaggcagaagggaaagctagggtcgaggccctcagggaaagaagcaaggccaaggggctggagtagagggaggaagaggggaagtagtggaagatgagactagctttactactgattatgatgtaagaatagtggccagtttcctttccaacttgggcccggcagaatggctcctgcaaagaagggtgatgagaagaagaagggtcattcgccatcaacgagatggtgacccgagaatatcccatcaacattcataagtgcattcatggagtgggcttcaagaagcgtgcccctcag

SEQ ID NO: 504 - DNA, 401 bp, Homo sapiens
cactcaaagagctccggaaacttgccctgaaggagatgggaactccagatgcacactttgataccaggctcaacaaagctgtctgggccaaaggaataagcaacgtctcatactgtatccatgttcggttgtccagaaaatgtaatgaagataaagatttaccaaacaagctctatactttggttgcctacgtacctgttaccactttaaaaaaatctacagtcggtgtgaatgtgaactaactgctaatcatcaaatataccaaataaagttataaaattgtttaaaaaaaaaaacaaaaaaaaaaaaactaatccaccaccattgagcaggctttatccctaggatgcaagactgatttcaacatatgcaaatcaataaatgtgattcaccacatgaac

SEQ ID NO: 505 - DNA, 1000 bp, Homo sapiens
tatgccaggctcagtactagacacaaggggtacagtcaatgaacaaaatacacacaatattctaccctcatagagcttacattttaaagggggaagcatacaaaaaataaattagctaaaaatataaatatcaagtggtaatagtaccacacagaagaataaagcagagtaagggtttagatggtgaagataggagagctgctcttttacatgaggttaacaggaaaggcatttccaagtacttctccctgcttctttctcatctgtgtgctctagttttactctccctcccttgtttgatccctattattacttgcaagtgtaaattccctaatgcagaacatggttagcatttggttaatggctttcccgtaataattgcattaaaatgatttctctccactatgaattatctgacatgtcagaacagacgaatgctatctaaaggctttttaaaatctgttaaatttatagggcatattccagccctcaccaagggtcacttcactccattctcagatagtgcccactgtcctgcatttgcctgctgtcaatcacaaaagagatggcttcttaatgaggctggtttatgacttttttccttaagacaaagtcagtcttcttttgcaaaagttgttctaatgaaggaaagtagaaataaaaattcatcatagcttctatggccagacataaaatgtctacagcaggattgatatggaaacataagcttttattaatttgtttatctggatgcttctgaagctagaaagaaagactttcaccatggaagcactggcaactgaatttccataatggattcaaagatctaaagaatatcctcaatttacatattctttctgaatttatgttcaaagaaagggtattaatataaacataaagtaaaataagacaaagcccaagtgtattaagactattcaaggcctgccatgcaaattgcagtggaaaagtctaccagtaggttattgggaaacagagagaa

SEQ ID NO: 506 - DNA, 1000 bp, Homo sapiens
cttggagtccaaagataggagaggatacccaccactaactttcaatgaaaccacaagctggccacttagcttttcttgtgctgtagagtcaaatgtgaaacaataggctttatttatttaatactttgtataaggcactttgctcagtacattatatattgtctcatcctcatagtgagcctgaagggtagtaatttcattgtaccttacagatgaataaacttagacttagagaccggtcaaatagcctgcccaaaacaaccagttaataaatggaattgggatttaaacttagatttgtctgattccaaagcttgtgcccaaccagtgtttattgagtaccttccaaagagccaagcaacagtttgaaataggttcacatatgttcaactatcacaacaaccagatagagtagatattctgttgaagatgaggaaatgatgtgggggagaaaaagtgattgtgtgggggagaaaaagtgattgtgttgaggtcacacatctagagtggtcgagtcagaatatgtgtgaactcaagacctctagctccaaacctatgaattttgtttttaaaacatgactatagtctattctctgtacaatgttcataatattttttctgccagttgcctgctccctttaggtaaagggataattagcagagattccttgcagaaaagtgtcaaatatcagcacttaaaaacagtgctgaattttcccgttatttagcccattacttcattgagcctaatttcatgcttctaaaaacagcataagttctgtgggtagtgttcagtatgcttcagtgaaccgaatgcatcctagtggcctgagaagactcctactgcttctaaacatgtatgaataatggttgccacctgcaagtagcttaggcagtgggcaatcatacttcaattctaaagggtgtggaagggatgagtattttctgtttgaagctcaagctagattaaatgaattcttgatcttaatctactttgaac

SEQ ID NO: 507 - DNA, 1000 bp, Homo sapiens
gcagagaaaacagttgggcactcttgtaggtgagagactgcatggccggggctcaactggcaacagtggagatggagagaggtgggtggaattgagatttattttgaaagtagaatggacaggatttgctgaagaaatgttagggaaaagaaagaaagcaatttgatatgatgtctcagtttctcactcaaacatctacgtggatgttgtggccatatttcttatttaacttatggatgaaagaaggtttcatatagcagataatttccaacaattcttaggcatcaatttacctgacaatagaaaactctgatgccatttgggatagaatgaattgttcctatatgacttccagagactgagtcattgtgggtgcttgtcatgcagtactcactgaggtgtaggaggatagcttcatggagaagatatatcttgaggtggatctagaatgaatatcaagctaaatttaaaattattaaggatggaatgaagtttatattcattatccacagtccatttgtatcaattttctgggatgtctattatcctgtaaaaaacatgtatttccgcagttataagagctttgatattggtgtgaaaacaatggtccctaattaagccataaggtattttgggaatttaaacaaatgtttggtggttatcaactgggaacttctggagaggtgaaatattgtatcggggacgcattgttctttttaaaggccacacggtgttctacttatatgtcatatcatgtacatagccagttccttcctggtggacatttaggttgtctcaaccttttcctatctccaacagtgcatgcttgtgcaagtatatccgtaggacaaaatcttaaggatagaattattagataaaagcagttaccaaatttaccaatcttcctttccagaagattgtctgggaatgactgcttttcttaccaccctaccaacacaggtgctaatctcataggaaaaaaaatgctactttgttttaa

SEQ ID NO: 508 - DNA, 1000 bp, Homo sapiens
tttaattcatgtttcttttgtcaggagtacaatcaagcaccttcctcctattaatatgtttatttcctcttctcacttttaaccattcttcaacctctacaattatgagaaagtaatgactgtcaaaaaaaaaattgctcattttttctgacatctttcaaggccctgaatagacgtcctaatttccaggtctgtgtagactgacttgggttactcaggtaatggcctctcttctgttgatgaacacacgtattgaagcatatatatgccaggctcagtactagacacaaggggtacagtcaatgaacaaaatacacacaatattctaccctcatagagcttacattttaaagggggaagcatacaaaaaataaattagctaaaaatataaatatcaagtggtaatagtaccacacagaagaataaagcagagtaagggtttagatggtgaagataggagagctgctcttttacatgaggttaacaggaaaggcatttccaagtacttctccctgcttctttctcatctgtgtgctctagttttactctccctcccttgtttgatccctattattacttgcaagtgtaaattccctaatgcagaacatggttagcatttggttaatggctttcccgtaataattgcattaaaatgatttctctccactatgaattatctgacatgtcagaacagacgaatgctatctaaaggctttttaaaatctgttaaatttatagggcatattccagccctcaccaagggtcacttcactccattctcagatagtgcccactgtcctgcatttgcctgctgtcaatcacaaaagagatggcttcttaatgaggctggtttatgacttttttccttaagacaaagtcagtcttcttttgcaaaagttgttctaatgaaggaaagtagaaataaaaattcatcatagcttctatggccagacataaaatgtctacagcaggattgatatggaaacataagcttttatta

SEQ ID NO: 509 - DNA, 1000 bp, Homo sapiens
cctcaatggtattgcctaggttttcttctaggctttttatggttttaggtcttacgtgtaggtcttcaatccattttgaattaatttttgataaggggtaaggaaggggtccagtttcagttttctgcttatggctagccagttttcccaacaccatttattaaatagggaatcctttccccattgcttgtttttgtcaggtttgtcaaagatcagatggttgtagatgtgtggtgttatttctgagcctctgttctgttccattggtctatatatctgttttggtgccagtaccgtgctattttggttactgtagccttgtagtatagtttgaagtcaggtagcgtgatgcctccagtttgttctttttgcttaggattgtcttggctatacaggctcttttttggttccataaagatgcttttcctggctttagttgtttcttctctaggatattctttacatcgcaaccagaataagtcatcaaaggtccaattatgccacattcttgctcaaagatcttcaatgaatcttgatttctatgtgataatggttaatttcctacatgattaacatgtactctgaagctagactgcccggattttgatcctggtcccactacttcctagttttgtaaccttggaaaaattattcaactcctttgtgctttagttgcctcggtgaaaaatggggataatcatagtgctgccttatagggttgttgtaataattaaatgattatcctgcacatagtaaacagtcaatgaatttatgctattattattagtctgctatttgtgggctttcatattttgtctcaaatccaaccttctctttactcactatttctaaacacattgtgcatttttcaatatatatgcatttcaatatctatcttttgcttcctctgcctgtaatacccttttctacgccctatctctcctgtgtctttagaaattctatcagttcttcaaatgaacctcaaatagacttcctccac

SEQ ID NO: 510 - DNA, 1000 bp, Homo sapiens
atccttcacctatcataccaggattgtttatgtttctgaaatttcacagcctatcttatacttttcctgtttacttgattcatgttggcttagtttaattacacacgaagaaatcttgtgttgcctgatggactgtaaactccttgaaaacagggtttgtgttcattttttttgtattctaaagtaacaaggaaagttctccaaacataaatgtaataggtatttgttgaatgaatatagaaggaagggtgtaggttttggataagaaatcatcattatcaaactagtcaaaaatgacaagagtattgttttggatgcataagtatagaattagtacctctcactcatcccccactaagacgtttttgtcgttagcttgctgctaactgggctctggctgttacctcgcaaagactctgaagtaggaaagagcttggcacatttagaaactcacagatcatcaatgctgtagtgaggtgaaggagggagaaagtaccatgggttgaagttagagagttggagagagataggataggtcactagaactttcaggccaagttatgcagtttagggttttttttttttttgttttgtttttaaacaatggaaagcctttgaagggttttaagctggggaataaaaagataatactttacttttaaaattgcacccaggatggatggaagacagagagtgggaagatgagtgaaagcagagaaaacagttgggcactcttgtaggtgagagactgcatggccggggctcaactggcaacagtggagatggagagaggtgggtggaattgagatttattttgaaagtagaatggacaggatttgctgaagaaatgttagggaaaagaaagaaagcaatttgatatgatgtctcagtttctcactcaaacatctacgtggatgttgtggccatatttcttatttaacttatggatgaaagaaggtttcatatagcagataatttccaacaattcttaggcatcaat

SEQ ID NO: 511 - DNA, 1000 bp, Homo sapiens
catctgctgtttcctgactttttaatgattgctattctaattggcatgagatggtatctcattgtggttttgatttgcgtttctctaatgaccagtgatgatgagcttttttttcatacgtttgcagggggcataaatgtcttcttttgagaagtgtctgttcatattcttcaccctctttttgatggggttgtttggtttctttcttgtaaatttgtttaagttccttgtagattctgaatattagtcctttgtcagatggatagattgcaaaaattttctcccactctgtagggtgcctgttcactctgatgatagtttcttttgctgtgcagaagctctttagtttaattagatcccatttgtctattttggcttttgttgccattgcttttggtgttttagtcatgaaatctttgcccatgcctatatcctcaatggtattgcctaggttttcttctaggctttttatggttttaggtcttacgtgtaggtcttcaatccattttgaattaatttttgataaggggtaaggaaggggtccagtttcagttttctgcttatggctagccagttttcccaacaccatttattaaatagggaatcctttccccattgcttgtttttgtcaggtttgtcaaagatcagatggttgtagatgtgtggtgttatttctgagcctctgttctgttccattggtctatatatctgttttggtgccagtaccgtgctattttggttactgtagccttgtagtatagtttgaagtcaggtagcgtgatgcctccagtttgttctttttgcttaggattgtcttggctatacaggctcttttttggttccataaagatgcttttcctggctttagttgtttcttctctaggatattctttacatcgcaaccagaataagtcatcaaaggtccaattatgccacattcttgctcaaagatcttcaatgaatcttgatttctatgtgataatggttaatttcctacatg

SEQ ID NO: 512 - DNA, 1000 bp, Homo sapiens
ttaacatgtactctgaagctagactgcccggattttgatcctggtcccactacttcctagttttgtaaccttggaaaaattattcaactcctttgtgctttagttgcctcggtgaaaaatggggataatcatagtgctgccttatagggttgttgtaataattaaatgattatcctgcacatagtaaacagtcaatgaatttatgctattattattagtctgctatttgtgggctttcatattttgtctcaaatccaaccttctctttactcactatttctaaacacattgtgcatttttcaatatatatgcatttcaatatctatcttttgcttcctctgcctgtaatacccttttctacgccctatctctcctgtgtctttagaaattctatcagttcttcaaatgaacctcaaatagacttcctccacaatccttcacctatcataccaggattgtttatgtttctgaaatttcacagcctatcttatacttttcctgtttacttgattcatgttggcttagtttaattacacacgaagaaatcttgtgttgcctgatggactgtaaactccttgaaaacagggtttgtgttcattttttttgtattctaaagtaacaaggaaagttctccaaacataaatgtaataggtatttgttgaatgaatatagaaggaagggtgtaggttttggataagaaatcatcattatcaaactagtcaaaaatgacaagagtattgttttggatgcataagtatagaattagtacctctcactcatcccccactaagacgtttttgtcgttagcttgctgctaactgggctctggctgttacctcgcaaagactctgaagtaggaaagagcttggcacatttagaaactcacagatcatcaatgctgtagtgaggtgaaggagggagaaagtaccatgggttgaagttagagagttggagagagataggataggtcactagaactttcaggccaagttatgcagtt

SEQ ID NO: 513 - DNA, 1000 bp, Homo sapiens
cttgggggtgtgtgcaaggcccctcactgcagaaaagaactgaaggtggggaagagaagagaagggagtgggctactggctggagaaccctggctccaaaaattttaggcatgggctgacatttctaactctccagtgggaaaccatttaaagcagtcaacacattgactacgaagtgcaggcactactttgagtaactagacttgatcgcagaggtccttgaatggcctcctggtctgcatgtgtaacaacagtggttattgttctctggactctaatgctgtaggtactagatgtgactgttctccagagacattcctagggagttgctaatggtggtggtggtaattgctattattatttcatgaacattgaaatcttttatttttttgtaaagttgtctccttgaatactggactgtaaaggtgtgtggatgtgttctagcaaattgagaattgtagttaattgagttctggttatttaactttttactgtagtttgtacttgttgcttgttcagagtctaggcaattttacatgggcttattttatcctttctccctatctccattagtcttcaagatcaggaaaatgatttatgtcattttaaaatagagccttcctctgtctctcattttccttcttctctctctctaaggtatattattgcctactatatcctgtgccctgtgctggaatttctcttgtgctaatttttattgataacatatgatggcttaaaatgtcatctagtgtttagtaaattcataatagaaaataactttgttccctcacaaatttttacagacatttaaaattagcacttcaatatccaagtattttgctttttcttttctggagagaaactaacacctgtaggtatttgttgacatgcaaaaaatgcatgcaagaattttaaaattttataccctataattggttgtatactattaattagacctcttctttagctctcttactgtatacactcttctgttttc

SEQ ID NO: 514 - DNA, 1000 bp, Homo sapiens
  misc_feature 344: n = A,T,C or G
caaattctctcctctttctctaaattcctcaccctgttccccaccctttccctgccttgtctctgggtttttgtctctcttgcctcatttttccttctttctctctcactttcttcccccaccccttctctcttgtttacactccccgctcatgtatgtgccgcttcgtctttgtgtttatatctaccaggggaaagaccaaccatctttatttttaaattttattttactttaagttctgggatacatgtgcagaatgtgcaggtttgttacataggtaaatgtgtgccatggtggtttggtgcacctatcagcccattacctaggtattaagccccgcatgngttagctatttatcctgatgctctccttcccctcactgcctcccaacatgccctggtgtgtattgttcccttccctgtgtcatgtgttctcattgtttagctcccacttacgagtgaaaacatgtggtgtttggttatctgttcctgtgttagtttgctgaggatgatggcttctggcttcatccatgtccctgcaaaggacattatctcattcctttttatggctgcatagtattccatggtatatatgtaccacattttctttattcagtctatcattgatcggcatttgggttgattccatgtctttgctattgtgaatagtgctgcaataaacatacgcatgcgtgtatctttataatagaatgatttataatcctttgggtatatacccagtaatgggattgctgggtcaaatggtatttcaggttctagatccttgaggaatcaccacactgtcttccacaatggaaccaaccatcttttaaagtaacaaatgacatctaagtgtgaagtccgaagtcaaagagctagagagtcatacagtttcagagttgtcgcagttttgatgattgattctctggcagggtcgtcctcattttgtacctgaaaatatagttctagtgaattatatcacttgtccaagcccacacaat

SEQ ID NO: 515 - DNA, 1000 bp, Homo sapiens
ggatttgatttggcatttgctgaaacaggcccccatcttacagacggcattgagactcggaagagttaaataatttcctcacagctactaagcactagaactagaataagaatgtgtgctttctgactctgagtctaggattctaggacttcaagggtttcctatctttttgaagtcatggggcagaacaatataaaggaacagctggaaaaactgaaatgaaattactattcactcttacataggaagaataaagataactcttgagggccctgatatattatagtaataaaaacaagactgaggtagcagaagcacatggacatgcagggaacacttccaaacatccttcaaaaggcctaacttctaaggacaggaaacatgaggaagcagagaaggaaggaaatgtgtctaaattcttccaagctgtttcttttactattcaggccaagccttctatctcttaaatcaaaatttcagggaaagcttatggcagatgagacttttgggagtacattagaaaacaggagggaaaaaggccttattactcactgatttgtatccttgtgttattttataatattattaaagctctttccatgttatatagattctgtctctcagctgtactgcaaatctattaggacaagtctcgtctcttttatgtattccttctactgtgtctatatgtggtggtctctcagtcgagcaggctgtacagtttattcgaagtgttccaaggagcttgtgtgcctccactgctctgacctcatttttgcaatgttaattaagttgggtagatgacctattcgactgataacactcactagctcactagtatatggtaagtagtttattctcttagttagttgaccgtgaccagattaaagcccaaaaagacaagaaaaaaaatcaggtggtagagagtggggaacagaggtataggacactgttttgggaaagtggatcttcttgtgttcctacagaggataactcgggc

SEQ ID NO: 516 - DNA, 1000 bp, Homo sapiens
  misc_feature 38: n = A,T,C or G
tgtcaggatgaggtattacaagaagagagaacaagagnggaggctcaccattaaatttggcttctggccttgggtcagccttgcatgatgttttgtagactgagagtaaggaaggagaagttgagacaaaaactttactctctgtttggtcactgagagtaaaggttctctttgtgctagcttattcttaagcagtatgcatgaggcatttaggggtttattgctgaagaaaattcatcctcttgtgctaattgggcagggattccaagggattaaaaccaaaatcatttgaccacctgagttacagtaattttagagcttaggttgtttattttcactgtatagcacaaccaaatactattcagtctggctgcatggaatgagatatggctaattagatttcctggctaacccaggttaaggcagaaatgccatgttaacagtagcacccttaaacctggggaaagaggctcttgcctcgtgtcacttgctttagagggccctactggtcttcctccactgtgccatgccttatggggagacgattctgcagagccatgtggatattgtcaatccaaagcaccccattccctcttctaaaccacttggtaccccacaattcctacctaagtgatcccaagatgacttccagggcctacgtgggtctctcttgagttctcatctcccgaaggtgaactgtaccacttgtgttgagcactcctaggaccaaagagtgtggggctgtgcatgaatcttagatgtttgggctgagatgtccttgggggtgtgtgcaaggcccctcactgcagaaaagaactgaaggtggggaagagaagagaagggagtgggctactggctggagaaccctggctccaaaaattttaggcatgggctgacatttctaactctccagtgggaaaccatttaaagcagtcaacacattgactacgaagtgcaggcactactttgagtaactagacttgatcgcagaggtccttga

SEQ ID NO: 517 - DNA, 312 bp, Homo sapiens
aactctgccaaccattttttcagaagatgtcagaattgatcgccaaaatcccaaattttggggtaacaacatttgtcaagcatccacaagtgtctgccctgctggaggaggatgaagaggcactgcattatttgagcagagttgaaatgacagaatttgaagatattaaatcaggttacagaatagatttttattttgatgaaaatctttactttgaaaataaacttctatccaaagaatttcatctgaatgagagtggtgatccatcttcaaagtccactgaaatgaaatggaaatctggaaaggatttga

SEQ ID NO: 518 - DNA, 314 bp, Homo sapiens
gaaatgttcatctggaaaggatttgatgaaatgttcaagtcaaatgcagaataaagccagcaggaagaggcagcatgaggaaccagagagcttctttacctggtttactgaccattctgatgcaggtgctgatgagttatgagaggtcaccaaagatgatatttggtcaaactcattacagtactacttggttcccgatatggatgatgaagaagcagaatgagaagaagatgatgatgatgatgaagaggaggaaggataaaaagatactaatgaagaagacaatgaagatgaaggtgaagatgaagatgatg

SEQ ID NO: 519 - DNA, 1000 bp, Homo sapiens
  misc_feature 451: n = A,T,C or G
acatgaaattcaagttgattgattgctataattttctcccatccatattctggatgaatcaaagatgaggctggcagtgtttctttccctttgaaaacacttggttcattttcacaaacagaaaaattacatggcttcctggagacattgatttgttcttctggaagggttggacctccattgagaatcactaatttaacaaaaagcccacagatcattgtatgagtgtgtgtgggatggggagggggagagagagaaagaaggaaagaaatgggttaaaatttcattttaaggaatcattttattgttggattagaaactaaagactgtccataaaaaagaggaaccattctaaaattttcataacttgctgtatgtgtgtattttatttcttaataaagctcaagtagtttctcatgaaagtcaatggatagagagccatttcaggacntgtttgaattggcagttggttggagtttggccatggcaggaaaggacagctgtttgttgtggggccttgtctccatggtgttgggcagcacatcttcagctctttctgggaagacctcaaagtaggaatagaccaagaaaaacagcaagagggcatgactgcatgctggtcagatggaattcagcctgtactgctctagcagagcttctccaggggttagaatgttttgcttttatagtcatctggattgtttgtttactaagggtagaaaggtcccagcctcacccaagacctcccgattcagtctctgtggggagctgcttgggaatctgtatgttagagaagctcccaggataattgtgatgtgtggtcatgtttaagagctgctagtgtaaataatggtgaacagtagcactggctggaagcactgtagaaattgtgtgtgtgtgtgtgtctgtgtgtgtctgtgtgtattgtgcaagagctatgagataagatcaggctactggaatttgccaagaagcagcacgggagacacattaactagac

SEQ ID NO: 520 - DNA, 1000 bp, Homo sapiens
ccaaggatgtggccatagactttcctagaaactccctcatctagggtgtgcacgtctggattgcactgactagtcctgattaaatcctgtatgcataggctcagtgcaggctgggctccagaaaaggccatccacaatgttttcttttaaaattccatatactatttatctttgattttctacctcctgcaggaatccctagatccaactttctttggtgagtttgcaggggtttctgatggttctcttgtttcacgggtttccttcttattttctactccttttatttggaatgtcaacctacaaacttaaaagattgagcaaactttgtaggaaaactacagaagttggaaccacatatgatgctttctattatatgcccaaagtctgttgtatatgatgaaaatgaggttttatttacttcttggtacaccaaacacaaacactctctaatgaggaaaagaacccaatgagggggaaaatgctggatgccaatggatggcaatgatttatggaactctgggctcagtggtagtgaatgatcatcttaagggaagacactattctacagttcggtgtagctgggatgactttatatcctagtttgcaagacagtcctggcctcacctgttgagctggtgtcccatctagttaagatacctttcatgctccccagtgtcctggttgagatactccgtttatgtggtcaccgtgaggataggaaacagagagaggagatttttctttggatcactgaatagtactcatttcattatatgatttatcccattccaggctcacccctaacatttgagggcccaggacaagacccccctattccacaacctattccttctcttcttgccctggctccactgtgcaactggaggatccttgtaagaatgtgtgtgggtgagccagcctgctcattcaactttattcacacccacatccactagctgcccatgaacacccctcaggcctaggggtgcgcacacct

SEQ ID NO: 521 - DNA, 1000 bp, Homo sapiens
  misc_feature 350, 682: n = A,T,C or G
tcgccgtcctatatgggcatggtttgtggcataccaaaacaattacaacagtagcatctgagatcactgatcacatatcaccctaacaaatataataacaatgaaaaattttaaatattataagaattaccaaaatgtgacagagacatgaaatgagcacacattgttggaaaaatggtgctgatagacttgctcaaccagggttgccacaaacctgtgatgtgtaacaaaacacagtatccgcaaagtgcaataaagcaaagtgcaataaaacagataagggctggaggctctggagttgaaagccctctacatggagatgatcattgaagacatgtgatgtatgcagncactaagagagaagctgtagaagaaaaagctgagtgttggagaatgttgcctatggggtatgaagatgaaggggagctggtgactgagactgggtaggagcagtcagagaggtaggagacagaacaggagggggtggagtgaaggaaaggaagaaaagtaagggcttaagaaggacttggccattctttacacaaacaaggcagacaaattcagagcagagacctgggatagtgatgagtgggtttcttagtgaccatagtgagaatggttcattggcttggtgaggacagatgcttatttatggggctcaggaagaatgggaagaaagacntggattttataaatgtgtgctattcccttaagcagattggcaataaaaggaaggaaaactttgaaagaaacagggtaaagaaatgatctgtctccaaaagaggcaattgtcttggtcatccaggaggtaaaggcaaaggcttgaagatgcaggaaatggtggggacgatggagagagctggcagggatagaatcaggagcatggctggagggattggtctcaggaagaaatagagacactgcttcaagattggagggaaggctgggcacagtgggtggctcatgcctgtagtcccagcaattttggaggctgaagtag

SEQ ID NO: 522 - DNA, 1000 bp, Homo sapiens
aggattgcttgagtccaggagttcaagatcagcctgggcaacatagtaagatccccatctttgcaaaaaggaaaaaaaagttagccagacatggtggcacatgtttatacttccagctacttaaaaagtaaccctgactcttaaaaaaaaaaactgaaggcaagaaagagactgtgtgtgatgacctatgacatttcatatgaaggaaggaaaaattgagataattcacctagaattgcctcaatttttgttgagtgggcaatgaagctgtttgttgagaaagttagaagtatatttgagaatctgaaagggcttgaaaagttaggatgtagactgggcatggtggctcatgcctgtaatccctgcattttgggatgctgaggcaggtgggttgtttgaactcaggagttcaagaccatcctgggcaacatggtaaaatcccatctttattaaaaatatagaaattagccaggtgtggtggcactcacctgtggttccaggtactcaggaggctgaggtgggagaatttcttgagcccaggaggcagaggctgcagtaagcagaaatcataccattgcactccagcctggatgacagagcaggaccttgtctcaaaaaaaacaaaaaaaaaaaaaaaaaagaaaaaagaaagaaagttaggatgtgtattagagatgaaaaaggggactgtccagtgagggaggaccagcatttggactggttgagtggcttggttctacaaggtattatcataggactttccttagtgactgatatggtttggctctgggttcccacccaaatctcacatcaaattgtaatccctatgtgtcagaggaggagcctggtgggaggtgattggatcttgggggtggatttcccccttgttgttcttgtgataatgagtgagttctcacgagatctgagtatttaaaaatgtgtagcacatcccctttctctctctcctgctctgccatgccaagacgtgcttgcttcccct

SEQ ID NO: 523 - DNA, 1000 bp, Homo sapiens
acagacattaaacaaatgtgtgaatacataatttaatgcttggccgtgataagggttattgagaaaataaagcaaggtgagcagaaagggaatgatggcggaggtgctttttttgattagtgttgagggaaggcttctgaagtgagggagtgagccatgacaatctgggcaaagtgtgctgcacgcaggggcattagtggatgcaaggctgtctgaatgacgtttggtgctgcagcagctgtacttccaatggaaagaagggtaggaaatgaggtgggggagacaacaagggaccagatcacgcaaggcctttgtagacaacagtaagctcgttacattctttctaagtgccatggcaatccattggtggatttggggcaggggagagacatggtctgattctggctgctgcgtggggcacaggctatagggagcaagggtggaagttgggaggctatgacagtcatggcaggggctgtgttaggagagtaacagtggagattgtgagaggatggcagactgtggagctctccaaaatgtgtttcatttaaagaagccaaatttagatactgtgatcagttctgccaagtcgagcctgtggagaagtatctcccaaagtagacccaacagacttccggtgacatctcagttacttttaggtgctatgtcacatgcatgaacttttaaattttaatagttactgatgattttaatgtggattagaaatatataaaacttgcatgtgaaaactatgattttacagttattacttggaatgaggaaaaagtattgagtgtagtgcagacttgaatgcagaaatagcaaaaatctctagggttatatctgaatgattggatttagaacatgctgacaggattatttgttagattgagtcctgagggatagtgaaggataactctggtaagtatgtaatcagatttagttattaccccttattgattatctactgaatgtcactctatgttaggcaccttctata

SEQ ID NO: 524 - DNA, 1000 bp, Homo sapiens
gacatttcactcagctttccctgcaacgctatgtgatgcgggtggtaattgtctttttttttttttttttttcatttaacagatgagagaagtgaagttcatagagaataaatagcttgttttaggaagtctctgatttttcagatattacaagattagctctggtaaattctctgcaaacaggaacttagtctgttttgtacactactgtctccttagaacatagaaacatttctagtatataatagacattaatcaatacttgctaaatgaatgaaaggaaaaagaatggttcttgtatttagatcttactcaagagtggtatattttgttttccttattatagaatgaggtttaggaagtaatctcttggagtttaatggaaagccattttcgtcataggatgacttcctgtgtcccctaagtgcaggtttcccaatgtccagaccttggccttatatttttctccttattctccttgaaggacctggctcttctggctataactacatgtgcaatccccaaatctcagtgtttgatcctaagctccagttgtaggatgtataaacccactaacaagcctagagccactttagggcaacataaccttggccaagtgacttaattgcccttgagccttagtctctgtcagtagaaggaagagatggaagaagaaactgagccttgatttgaacaaaacctatgggcactagaagaaagaaagacagggtgcttagggagcataacattaggggggagaagacctagaaagcaaacaattgaatttctattccttttgagcacccttattttgttttctatctagaactttctaaggagttaaaaaaagactcttttacataagttttttcaaaaggcttaaatttattttttcttaaaaaaaggtaaagtattgaaaataaagccattcaagcatttagagtcctggagaagctctaacctgcagctagagcagcttcacacacatcctttcgctgcc

SEQ ID NO: 525 - DNA, 1000 bp, Homo sapiens
ttattatttggggaactgattatttcacaaaatatattttctagatagctgaagtttattcagtcagtttcaaaacttctagatatagccagttttcatgggtctttacaaaaggatccctgtatctttgtttcttctgttttagagagattaaatggaatcttcctttggtgatactgattgaggtgatactgagataattaagaggacatgaagggatttaggaagagtgtttgcccctgcactaactggcccagactgctctactgcatcagccctctggcgatgttctaagggtttggacttcagtctactgcctatactagtacccttgctttaaaattcctgctcctattttgctataggctgtaagcaagaaaatagcctagtttctaaaacctatgtataaaatgagagaataggtgtcactcagggtgtcagttctcccctgagagtaaataagacgtgactgcattttttccttctgggtgagggttatgttttagagcaagggttggcaaactactacttcctgtaggccaaatctgttttttgtaaataaagttttattgtaacacagccatgctcatttgtttatatgtcatctactgctgctttcacacactgtaagggcagaattgagtggttcccgcagagaccatatggtctgtatagcctaaagtatttaatatctgaccttttacaaaagagtttaccaaactctgttctagagctttaaaattggacagagacagaaataaatgagatgttactacatttagtagtctccactaacctgcctattcaattatttgcagcaccacatcccttaaatgtattttggagaaacaagaatttattgcagtaggctatgttggataaagaacaaacagccctcagtagcacattgtgaatattaagaggtggtgaagctgtgattgtcaagccaagttgtttgggaatcttcattttagtatttgttgctctagtgtgatcagta

SEQ ID NO: 526 - DNA, 1000 bp, Homo sapiens
ataacatgatgcaaaattatatagctttctgttgtgtgctgtagaatgttgttctagagatactaccagttggtagctccttttttcatgcaattattcaaagtaaatgtaaatatgtctgttgtccttttcttttacatgaaaacttcccccctccccaacgctgtaagattcagaagcatagtgtacagaaaaggatcttgaacttgggtttgaatcctgacttagtcactttataaaggagaaacatcaagttacattgccaccgccagcctcagtttccttgcctgtaaaacagaggtgggaatccaggctatgcttgccacaaaaggaggaccaaatgagactcagcatactagaaggctctacagcgcatattattacctgtgtctttaataatgttctcgatttggttcactttctcctcatacaaagatgtgtatgtttatggaaaagaatatacaatggattctgagtgaactaaaattgtcaactgcactgggtatgagtctgcaagcatgaaggaggctgggtgagaaagcctcttcaaacagcatatgtattcctctggtgtctgctttattattcacttctctaatgtgaaagtttatgctttagtgcagagctcctgggaaatatgcaaagaaaaaagaaaagataaccttggaggggaaaagaggtagtgcttatgccaatacaaaagcatgaatagaagcaaatagttgctggtttcttttagctgtagttctttaagtgaatctggtatatatacaagaaggtagttaatgttttaaagatgaaggaaggaatagtttcttttaatgaaaatagactctagtgctacggaaatgagaagtcccctgtgatgaggctagaggagaattactgaaggatgaagtgaacgtacgtggctccattttgtttttcttggaggccataaagaaaaccagacagcttactcagtgtaagttatttatacttgtaaaaaaaatcaccccat

SEQ ID NO: 527 - DNA, 1000 bp, Homo sapiens
  misc_feature 540, 555: n = A,T,C or G
ttatttaattcagttaccatatttgacaaataaatggtggaaccaagatgttaccaggtttaagtttcatatacagtagaactgtgacaggaacctagagtacctggaactagaatccagatctctgccctttcagtttaggatgtactgacaatatatattgctacttaaaattgctaaaacaaaatttataagcatctatatattttgcagctaggacaattatctacaaacatgatatttaatggaagatatggtaataacatctgagatatacaattatgttataaaatctaaaatcaacaagaaaggaataaagttgtaccattccaggaaatacatttccagagctttagatatccttattagattctacatgttagttttggtgatgttaactgccataacatataaaatctgaaatcttgttgacttaactgagaagtttatttctcactcaatcaaagcctaaagtgagtattcttgatgggcagattcttctcattcattcaagcagtgttcttgtgactccactcttancaccttgttgtcacnaccagcttcctggtgtctgtgctttggcaaaggagaaaactcatagaagtctgctcaccttctattggccagagcttggtcacatggccccatatagtgaaagggaagctggggctatagtcctatttgtgtctgggaagaataaaaagttggtttggtgattgtcttagttcaggctgctgtaacaaagtatcatcaactgggtgtcttataaacaacagaaatttattttttttttacagttctggaggctagaattctgagattagtgtgccagcctggtcaggttctggtgagggctgtcttttgggttgcaagtggctgacttctcctattatcttcacatggcagaaagagggtgagctagctctctggcttctttttgtaaaggcacgaaccccattcctgatggctccactctcatgacctaattatcttccaaaga

SEQ ID NO: 528 - DNA, 1000 bp, Homo sapiens
  misc_feature 75, 445: n = A,T,C or G
accatctccaagcaccaacacattgggaattagatctcagcatatgaattttgggacgatatgaacattcagtcnacaacaatgatccactaagctatttctgccatacctttttttcttttctcttttctttccttactgttcttcagtatgtctatgtagaatctatgccttgtaaccaataaggtaatgaaaaaaattataatatttaccatctggaagaaattaggaaaatgattttacttttaaattcttgatccatatgttaaaaaatttccaaggctattaaaatatcactgaacattgtgattatagagattgctatgatttaatacttatgtcttatagtgaaaaagtagtcctgggatatttttctctctttacctcacccatcctcttctatgtcaggtatttgaatcccttgctttgtagttttataaaaagntggggagaaaatgaacaattgtcaaggaagatgaaatggctaatcaaaattcattcattctccatagttccttgggtattttataaactttgcagtaaatgctaacttcttattggggaaaactgctataaagtaagtgtacaggtaggttttggagaaatttttcttgcatggagttgagcaaatggtgcatctaacataagcttggtttatagtttctgtttttcagaagctagaagatttttctccactctgaacttctagggatcaacaaaagtatttatatcacaaataaaaaaaaacacagttacctctcagtaaacaattttttttcagattattctatttaaaaaatctctccaaatctgttaattttctgttaataaaacatcagtttcaataaaagtcataagcctgtcaaaccaattttagtcctttatcttggatatagtaggttaaaatatttttgttgggtgttaagccaataataaactcagctattttaacaaccaaattattttcctcctataaaccaaatttacaatcaagctactt

SEQ ID NO: 529 - DNA, 1000 bp, Homo sapiens
gggctgaatgaaaaaccatgcgcttgttgtaaaaaagccttataaaaagtacattaaacacatacagacacaaccataacagaagaaagtatgtggattggaatttgtgattggagcagatcaaattaagccagggaagccgttattaggtttgtatgattgctggggggtaacttctgttgctgacaaggtttaggataaagctggagcagattgaagtggaaaaccagaaaacatcagcatttcattaccttctatagcatacactgcagggtagaattaatactgagtatagactggtaaatgtgagcagtttactgtttgcttttaaatcattattgatttcccctagcctatcataaaaaataatagggcttttgcctatgaaattagtgcttagaaatatttttcttcctcccaaataatttttatactttttctcaatacagcacaaaggtaggtcattaaaaataaaggggttccttttcaagttgctttttgtctaatttttcctctttagacctgtagatacaaatgtatgtatttgtgctatgtataactctcaagcataaatcatttgaacagtatttaaaatcacaggctcctgtggcaaatataaacttttaatagctatagttggcaattacttgccaattcctataaaaataacattagtggcttatttttgattgcacctaaacaactggcatgatttagccagtaggagagaaatattagttgtgttttgcataattttgtgtttagatcacactggaaatacaaagttttgttgttaaaaatatttttgctttctgaaatattatcccctttcagatcacaccaatgaatgaagtttgtagaaagaaagaaaagtagccaacgtagactccttttctgtatcaatcaaatatatgcaaaatacatagatttttaaaaatgtaattttaatacattcctttagaaacacatttacttcatgaagaaacagtataatgagttc

SEQ ID NO: 530 - DNA, 1000 bp, Homo sapiens
tttattgacccagaatagtgagttgatttattgagtttctgtagccatagacacgaatagtaatggttggctcattcttagctatacattcctaactgactgtattagtgggagaaaggagtgcatctataaaataaatataatcccatccctcaaggtggtctggagcccatctaagagtaagaagtagtagagttgaagctgctttatctgaatcagctcctgacttcaactcagctcctctttttccttaggtccatgtggcccacttggtgtagtattcacatctccttccacctttttatgccttcattgtttacattaccttgcttgggctcttattgagatgaatcacataaaaatgcttaattatcaaacattaatcagctgcctatataattcagaggatgtttaaaaccaaggctcaaggaaattctggtgggtgtatactaggagtatttacgtcttgcatcggtactttcctctgggacttccatcacttcagttcttcctgagatgccagagtcatatctcttacttgtgaaagaacagagctttaagaaatggagtctagaggtgccaggtgcccagtggacagtgggctgggggcaaggcatggtggggaaagcaaaaaaaatctcccaaacagcaatagttgatctttcttctatccactcctctcaattttctaaaaccatttttgtctaactgtggaagttcttttgcagataaggttctgtaaaactatgcatatctgccatagacagatggatttgacgaaagatgtatccaaaaaggaatgtatcacatcatgaacttgctaagtgttcatgaatacacactggcatttggagactattaacactacctactgaagcaaagacataaatccaaattgaagaaaatataattttttgattgaattacattttccagtgggtttttttttttttggtgaattttgtttttggaaaaatttgctcttccctccaacgttttt

SEQ ID NO: 531 - DNA, 1000 bp, Homo sapiens
tttgatgcatttgctagctctgtttgttttatggggtcagtaaagtggcagaggtccaacaggagcaggttaaagcaggatgctgggatcaaagcttagagagcacttgagtcaggcaagttttaagttttcccacccccaagcatctcagtccaaaactgagagcaagcagcaaatattataataaatgctttggggacaggggtacacagcagatagggcacagtaacaggagaaatgtaaaatgatggcagcaatacttttgttcactgtaatctgcagccaattgaagacatacactatgaataactaaaacatttttatatgaacaaaaatgctcttcagtggttctgtttatgtggtagagggctgaatgaaaaaccatgcgcttgttgtaaaaaagccttataaaaagtacattaaacacatacagacacaaccataacagaagaaagtatgtggattggaatttgtgattggagcagatcaaattaagccagggaagccgttattaggtttgtatgattgctggggggtaacttctgttgctgacaaggtttaggataaagctggagcagattgaagtggaaaaccagaaaacatcagcatttcattaccttctatagcatacactgcagggtagaattaatactgagtatagactggtaaatgtgagcagtttactgtttgcttttaaatcattattgatttcccctagcctatcataaaaaataatagggcttttgcctatgaaattagtgcttagaaatatttttcttcctcccaaataatttttatactttttctcaatacagcacaaaggtaggtcattaaaaataaaggggttccttttcaagttgctttttgtctaatttttcctctttagacctgtagatacaaatgtatgtatttgtgctatgtataactctcaagcataaatcatttgaacagtatttaaaatcacaggctcctgtggcaaatataaacttttaatagctat

SEQ ID NO: 532 - DNA, 1000 bp, Homo sapiens
gttggcaattacttgccaattcctataaaaataacattagtggcttatttttgattgcacctaaacaactggcatgatttagccagtaggagagaaatattagttgtgttttgcataattttgtgtttagatcacactggaaatacaaagttttgttgttaaaaatatttttgctttctgaaatattatcccctttcagatcacaccaatgaatgaagtttgtagaaagaaagaaaagtagccaacgtagactccttttctgtatcaatcaaatatatgcaaaatacatagatttttaaaaatgtaattttaatacattcctttagaaacacatttacttcatgaagaaacagtataatgagttcatttattgacccagaatagtgagttgatttattgagtttctgtagccatagacacgaatagtaatggttggctcattcttagctatacattcctaactgactgtattagtgggagaaaggagtgcatctataaaataaatataatcccatccctcaaggtggtctggagcccatctaagagtaagaagtagtagagttgaagctgctttatctgaatcagctcctgacttcaactcagctcctctttttccttaggtccatgtggcccacttggtgtagtattcacatctccttccacctttttatgccttcattgtttacattaccttgcttgggctcttattgagatgaatcacataaaaatgcttaattatcaaacattaatcagctgcctatataattcagaggatgtttaaaaccaaggctcaaggaaattctggtgggtgtatactaggagtatttacgtcttgcatcggtactttcctctgggacttccatcacttcagttcttcctgagatgccagagtcatatctcttacttgtgaaagaacagagctttaagaaatggagtctagaggtgccaggtgcccagtggacagtgggctgggggcaaggcatggtggggaaagcaaaaa

SEQ ID NO: 533 - DNA, 1000 bp, Homo sapiens
cgactttatgcttatcactttcagtctgcattattctactaaaaataaaaagaaagatgaaaattacctcaggcgtttgctgccgtgcctgccctttggtttctgggacggctcgggtcccgtagcgccggcacagctgagattgccaagccgggaagagaccttgctccaggtgtagctgcgttttccccagatcacctgtccttttcccctccgacaaggaagctgtgatttttctctggcctttagaggcaaagtgattccagataagtagattaatgtgtagaatatctcatctgtgttgttccagtgcagccctttcagctttccagagccagttagacttgttatgaggagctaagtgattggctggctctggagctcagtttcatagattatagcccagcgtacgagaagcacgagtcctatagttggcgtaccctgaggcctgccagttcctgccttaatgcatatgtagtcgtaattgagttctgacacggccttggatgtttctgtcctaaatagctgacattgcatcttcaagactgtgtgagtaatcctgatattttttttttaagctcagtaaattaattacatgccctgggagggagtgattgtaagtagaaaatactgaactagcagatgattcgtttttaaggtgctatactatgtgtatcaagttcaagacgatgaatcttaaagcttctaagaactggcagggttattccagctttgtgccatgaatcacagtcaagctgcattttgaaggaggctgtttgatgcatttgctagctctgtttgttttatggggtcagtaaagtggcagaggtccaacaggagcaggttaaagcaggatgctgggatcaaagcttagagagcacttgagtcaggcaagttttaagttttcccacccccaagcatctcagtccaaaactgagagcaagcagcaaatattataataaatgctttggggacaggggtacacagcagatagggcaca

SEQ ID NO: 534 - DNA, 1000 bp, Homo sapiens
taacaggagaaatgtaaaatgatggcagcaatacttttgttcactgtaatctgcagccaattgaagacatacactatgaataactaaaacatttttatatgaacaaaaatgctcttcagtggttctgtttatgtggtagagggctgaatgaaaaaccatgcgcttgttgtaaaaaagccttataaaaagtacattaaacacatacagacacaaccataacagaagaaagtatgtggattggaatttgtgattggagcagatcaaattaagccagggaagccgttattaggtttgtatgattgctggggggtaacttctgttgctgacaaggtttaggataaagctggagcagattgaagtggaaaaccagaaaacatcagcatttcattaccttctatagcatacactgcagggtagaattaatactgagtatagactggtaaatgtgagcagtttactgtttgcttttaaatcattattgatttcccctagcctatcataaaaaataatagggcttttgcctatgaaattagtgcttagaaatatttttcttcctcccaaataatttttatactttttctcaatacagcacaaaggtaggtcattaaaaataaaggggttccttttcaagttgctttttgtctaatttttcctctttagacctgtagatacaaatgtatgtatttgtgctatgtataactctcaagcataaatcatttgaacagtatttaaaatcacaggctcctgtggcaaatataaacttttaatagctatagttggcaattacttgccaattcctataaaaataacattagtggcttatttttgattgcacctaaacaactggcatgatttagccagtaggagagaaatattagttgtgttttgcataattttgtgtttagatcacactggaaatacaaagttttgttgttaaaaatatttttgctttctgaaatattatcccctttcagatcacaccaatgaatgaagtttgtag

SEQ ID NO: 535 - DNA, 300 bp, Homo sapiens
aagttcaagacgatgaatcttaaagcttctaagaactggcagggttattccagctttgtgccatgaatcacagtcaagctgcattttgaaggaggctgtttgatgcatttgctagctctgtttgttttatggggtcagtaaagtggcagaggtccaacaggagcaggttaaagcaggatgctgggatcaaagcttagagagcacttgagtcaggcaagttttaagttttcccacccccaagcatctcagtccaaaactgagagcaagcagcaaatattataataaatgctttggggacag

SEQ ID NO: 536 - DNA, 300 bp, Homo sapiens
ggtacacagcagatagggcacagtaacaggagaaatgtaaaatgatggcagcaatacttttgttcactgtaatctgcagccaattgaagacatacactatgaataactaaaacatttttatatgaacaaaaatgctcttcagtggttctgtttatgtggtagagggctgaatgaaaaaccatgcgcttgttgtaaaaaagccttataaaaagtacattaaacacatacagacacaaccataacagaagaaagtatgtggattggaatttgtgattggagcagatcaaattaagccaggga

SEQ ID NO: 537 - DNA, 1000 bp, Homo sapiens
gactcttctttctgtgggtgggtgaaaagcctacccatctgcaaaggtagctctgaaactgttctggaaaatcctgtattttcctccacaaatgatcgttttagtttcaagtttatttcaggtacattaattctccccctcctcagacttcataacaaatgatcctgcacacgattagaataggaaaatgtaaaataaaatcgaagcatatctagttgcctcagcgactttatgcttatcactttcagtctgcattattctactaaaaataaaaagaaagatgaaaattacctcaggcgtttgctgccgtgcctgccctttggtttctgggacggctcgggtcccgtagcgccggcacagctgagattgccaagccgggaagagaccttgctccaggtgtagctgcgttttccccagatcacctgtccttttcccctccgacaaggaagctgtgatttttctctggcctttagaggcaaagtgattccagataagtagattaatgtgtagaatatctcatctgtgttgttccagtgcagccctttcagctttccagagccagttagacttgttatgaggagctaagtgattggctggctctggagctcagtttcatagattatagcccagcgtacgagaagcacgagtcctatagttggcgtaccctgaggcctgccagttcctgccttaatgcatatgtagtcgtaattgagttctgacacggccttggatgtttctgtcctaaatagctgacattgcatcttcaagactgtgtgagtaatcctgatattttttttttaagctcagtaaattaattacatgccctgggagggagtgattgtaagtagaaaatactgaactagcagatgattcgtttttaaggtgctatactatgtgtatcaagttcaagacgatgaatcttaaagcttctaagaactggcagggttattccagctttgtgccatgaatcacagtcaagctgcattttgaaggaggctgt

SEQ ID NO: 538 - DNA, 1000 bp, Homo sapiens
tgatgcatttgctagctctgtttgttttatggggtcagtaaagtggcagaggtccaacaggagcaggttaaagcaggatgctgggatcaaagcttagagagcacttgagtcaggcaagttttaagttttcccacccccaagcatctcagtccaaaactgagagcaagcagcaaatattataataaatgctttggggacaggggtacacagcagatagggcacagtaacaggagaaatgtaaaatgatggcagcaatacttttgttcactgtaatctgcagccaattgaagacatacactatgaataactaaaacatttttatatgaacaaaaatgctcttcagtggttctgtttatgtggtagagggctgaatgaaaaaccatgcgcttgttgtaaaaaagccttataaaaagtacattaaacacatacagacacaaccataacagaagaaagtatgtggattggaatttgtgattggagcagatcaaattaagccagggaagccgttattaggtttgtatgattgctggggggtaacttctgttgctgacaaggtttaggataaagctggagcagattgaagtggaaaaccagaaaacatcagcatttcattaccttctatagcatacactgcagggtagaattaatactgagtatagactggtaaatgtgagcagtttactgtttgcttttaaatcattattgatttcccctagcctatcataaaaaataatagggcttttgcctatgaaattagtgcttagaaatatttttcttcctcccaaataatttttatactttttctcaatacagcacaaaggtaggtcattaaaaataaaggggttccttttcaagttgctttttgtctaatttttcctctttagacctgtagatacaaatgtatgtatttgtgctatgtataactctcaagcataaatcatttgaacagtatttaaaatcacaggctcctgtggcaaatataaacttttaatagctatag

SEQ ID NO: 539 - DNA, 1000 bp, Homo sapiens
  misc_feature 476: n = A,T,C or G
tatttatgttttttcaattttttctttgagacaggatctcactctgtcactgaggctggagtgcaatagcacaaccatagctcactgcagcctccaactcctggacttaagtgatcctcccaccttggcctcccaagtagctgggactacaggtgtgtgctaccatgcccagctatttatttatttgtttctcttttttgcagagatggggtcttgctgtgttgctcagggtggtctcaaactcctggattcaagtgatccttggccttctaaagggctgggattactaaaggggcgagccaccatttctagctgacaattttcttttttttttttttttaattatactttaagttttagggtacatgtgcacattgtgcaggttagttacatatgtatacatgtgccatgctggtgcgctgcacccactaacgcgtcatctagcattaggtatatctcccaatgctatccctccngacaattttcttttaatgagcagtcaccatataataggctcagttctaagcatgtatttgcccatttaatcttcacaccagcctaggaggtagttactgtgtgtggcacccttttatataggaggaaactgaggcataatgctgttaagtagcttgctcagggtctaacaattaagagtcagagctgggatgtgaacccaggtggcctgactccagagtttctaccaaccaccatgttatactgctttacatgtttaaagcaaagatatggttttagcatcaaatattaagaatgcactccccacatttttcttattaaatgtaattgccagtttttgtatatgtcattgtcctaatgctttcgagaaacttagacaaagagcaagaccacagataaatggatccttctgttcaggtctcattacctagaagagttttgactgcaatatatgagtactaaaagttgatggtttatgctaattttaagtgtaatatattttagaattttgtcacatgcattatta

SEQ ID NO: 540 - DNA, 1000 bp, Homo sapiens
tatgatttcatattcatggccttaggaagattaatttaaacaataacaacaagaacaacaacaacaacaaaatacaacaaaaaatttcccccatgtgccaagagcaaattttgaggtccatttatccagataaagtgttttgttatctgaaccaagaacatgaactttatctttatagtgaccacagactcccatctctagtatcatgatttttaatttgaattaaagcatttttttttgctttgttaagatgaggcaggccttcttgctgacattttaaaaagcaactatttttctttcagtttacactatgaggcattggctccaactgtcagcattgaaactgtcagcagttccctaccaggaaactggttccaaggtctagggtttccttaggtagaggctggcactgtgaaaataatggggctctttatccatgtcacctggaatggagttaataccctgccagtcttagttgatttgacatactaacaggatgggtctgaacgttttctatagtttactcatgagtgactttctttggcttacgtaaatggcaaggccagacaaattagcttatggacctagcaatcattcttggcccagattttgagacacttttcaatcaaccatagttgctctaatacctgagatttgctgacagtgcttggttcagaaaaaggttcagtttcctgagcaatttttcttttattgggatcatcttaattcttgtttgcggggttaagatgaaggaaatatgagcaaggactgcactcagctatttgggtgacccttgtataccatgagcttcttagatagggcctgatgtgatcaccagaaaacattaattgatcgtgatgacaggagatagtctctctagccagaacctgctaatacaagtcctgatgaattgagaatgatgcctgaaggaagcagactgacgtggtgcattagtaattttaggcaaaagaagataatggtactagtatgtatatttttt

SEQ ID NO: 541 - DNA, 1000 bp, Homo sapiens
  misc_feature 826: n = A,T,C or G
gctgcacccatcaactcgtcatttatattaggtatttctcctaatgctatccctccctcagccccctacccactgacaggccctcgtgtgtgatgttccctgccctgtgtccaagtgttctcattgttcagttcccacctatgagtgagaacatgcggtgtttggttttctgtccttgtgatagtttgctgagaatgatggtttccagcttcatccatctccctgcaaaggacatgatctcatccttttttatggctgcatagtattccatggaattcaccttcattttcaatattgtgtatatttattgcagtgagcttaatcctaataaaaacaattttatttctatttatttatgttttttcaattttttctttgagacaggatctcactctgtcactgaggctggagtgcaatagcacaaccatagctcactgcagcctccaactcctggacttaagtgatcctcccaccttggcctcccaagtagctgggactacaggtgtgtgctaccatgcccagctatttatttatttgtttctcttttttgcagagatggggtcttgctgtgttgctcagggtggtctcaaactcctggattcaagtgatccttggccttctaaagggctgggattactaaaggggcgagccaccatttctagctgacaattttcttttttttttttttttaattatactttaagttttagggtacatgtgcacattgtgcaggttagttacatatgtatacatgtgccatgctggtgcgctgcacccactaacgcgtcatctagcattaggtatatctcccaatgctatccctccngacaattttcttttaatgagcagtcaccatataataggctcagttctaagcatgtatttgcccatttaatcttcacaccagcctaggaggtagttactgtgtgtggcacccttttatataggaggaaactgaggcataatgctgttaagtagcttgctcagggtctaacaatta

SEQ ID NO: 542 - DNA, 1000 bp, Homo sapiens
  misc_feature 350: n = A,T,C or G
gagtcagagctgggatgtgaacccaggtggcctgactccagagtttctaccaaccaccatgttatactgctttacatgtttaaagcaaagatatggttttagcatcaaatattaagaatgcactccccacatttttcttattaaatgtaattgccagtttttgtatatgtcattgtcctaatgctttcgagaaacttagacaaagagcaagaccacagataaatggatccttctgttcaggtctcattacctagaagagttttgactgcaatatatgagtactaaaagttgatggtttatgctaattttaagtgtaatatattttagaattttgtcacatgcattattantatgatttcatattcatggccttaggaagattaatttaaacaataacaacaagaacaacaacaacaacaaaatacaacaaaaaatttcccccatgtgccaagagcaaattttgaggtccatttatccagataaagtgttttgttatctgaaccaagaacatgaactttatctttatagtgaccacagactcccatctctagtatcatgatttttaatttgaattaaagcatttttttttgctttgttaagatgaggcaggccttcttgctgacattttaaaaagcaactatttttctttcagtttacactatgaggcattggctccaactgtcagcattgaaactgtcagcagttccctaccaggaaactggttccaaggtctagggtttccttaggtagaggctggcactgtgaaaataatggggctctttatccatgtcacctggaatggagttaataccctgccagtcttagttgatttgacatactaacaggatgggtctgaacgttttctatagtttactcatgagtgactttctttggcttacgtaaatggcaaggccagacaaattagcttatggacctagcaatcattcttggcccagattttgagacacttttcaatcaaccatagttgctctaatacctg

SEQ ID NO: 543 - DNA, 1000 bp, Homo sapiens
acaggtgtggtacaggttgtataatcatgatggtgaccctgcatggagaagggaaagcttgaccttttccttggctcagggctatgcaaatagggctggcccatttctgagaggggaaggtagctgatatgcaggtgtgattccctagggcccagaaagacctgcctgccttctgcctttgttgtcatgcttcatgaggcctgaaatgttcactggtggttatttctctggttctcagctttagctctagaaagcccctattgaaatgacatgccacttggaagatagcaggaccatttacttatattttcacagactgctttaatctgctactctggggatggcacacaaaaagatttagttgatgggagggaggttaggcccctttgtgggccacaaagaagaatctggggagcccagggagactattctgggggtagaagtgaggaggaaaggctctaaagacaaactggacctatgtcacagttccgagggctgtcctccagaatacattgttttcctgaaattctccagccccttccatcattttcctctcagtgaatgtccagtgctgaataactgcccccttagtcacaggactggactgcagcagtgctgcaggtggtgaggctcagtggcacaagtggctctgggagggaatcttgatgtcggattctgtagctgcaccagcagagggggaagagggagataattacccacctctgagtctgagatccccctacccccagtgcattcttctgccaggagcaggatcattagaataagtgagacttagcttagctcattcaactccttgccaggccccatgcaaagctttcaaactttcaaatatacgatcatttctagagactatgttgggatcccctgcatttctttatccatttgttgagaaggaccagagatgatgcctaactttagccaagagtttgtctgtgggtccgataagcctcacatttgattttattggaattttaatctt

SEQ ID NO: 544 - DNA, 1000 bp, Homo sapiens
cagaaagtaccctatgtttcaattttaaagcattttttttgttaaactgaaaacatccctcaatttttccaatgttcgtttgtcctctagtgctaatttatgtggtaagtggtactggttcattaatttactcaggagggtgtaaccacctttcatggagaaggggtggctaggaaggggtttctagtgaaggaattcatttttcttggtcttcatggtgggtgctggggaagggtgtgcagtcagaggggctgcatttgcagaaacatggctctgtgtgtgagcctgggttctcaggaataggaagcaggtaggtgcagtgggtgggtattcatgtgacagtggaggaagataaggacaaagatcatgcatgagtagtgaatgaatgaatgaatgaatgaatgaatgaatgaatgaatgattgtgtatagaagtccatactccttctctggggtggctattccttcaccaagcagactctgttctttcttctgctgcttcttagtgagcacgtctaagtctcagttgatattctcttgctctgagaaatttctcatcaatgggaggagaaaatataattcgcttcaacatagctcatatttaagctgagaattcagcatgaattccagacatggttcatgtattttggataatcagcatagctgttcatgatcggtaaccctcttttttctcctccttcaaatcgtttttggttaggttaccatgactgaagattaatgacttccattattttttttccctcatgcaggaatgtttaaactagtctaaactttgtaccaactatcatatgaatcatgtctactactgttaccccttgtgtgtcatgtcctgggttagtgtccttgcatgacacagcaaaatacagggcagggttaaaagtgtcaattgagaaccaggcaaaaaactgatgattaatagtgaccaacacacttcactgtgctgttatcttagaggccttaaggcaaaatcttacttacaa

SEQ ID NO: 545 - DNA, 199 bp, Homo sapiens
tttgttgtcatgcttcatgaggcctgaaatgttcactggtggttatttctctggttctcagctttagctctagaaagcccctattgaaatgacatgccacttggaagatagcaggaccatttacttatattttcacagactgctttaatctgctactctggggatggcacacaaaaagatttagttgatgggagggagg

SEQ ID NO: 546 - DNA, 201 bp, Homo sapiens
taggcccctttgtgggccacaaagaagaatctggggagcccagggagactattctgggggtagaagtgaggaggaaaggctctaaagacaaactggacctatgtcacagttccgagggctgtcctccagaatacattgttttcctgaaattctccagccccttccatcattttcctctcagtgaatgtccagtgctgaata

SEQ ID NO: 547 - DNA, 1000 bp, Homo sapiens
  misc_feature 960: n = A,T,C or G
caaccatctgcagagggcccacattggcagcaaaaggaaatagccaagactcacaggagcacaacagccagtcaggtttgggattcacttctctgatactgtgccaaagttggtggactcagccattctgaaactcactgttcacttggggcctgctttgcacaacaaaacaaatagccctgttttgctttccatgtctgaggcagaaaaataaaaatggcaatattttgagtgtttttacattgggaatttctggtccatagataattatttcagatacccctgtgtaatcttttcagagctgttgaaaactgtggaataggggataattagggctcaagagatttcattaatggttaaaggatcattagaaggacacgtactgtatccctcttcttatttctcttcctgcactaaaacaactcctggcttgctaccatacttccgcacccatgtgcaattttcacttagcaaaaggtcaagtctaagtagaatctatgaagttgggattgattctgattggtaataatgctagctagcaagcattgaaaatttgtaccaggttttctgttaagtagtctgcatgcactatctcaatgattcttaaggagtggtccatagatcactggctttacaaacattgacgcatggtggtgggtgtgggcaatgaaaaggcagattcctagattctactctagatccatgggatcagcatcctgtagtgggagccagggatctaccattttagcaggtgccttgggtcatcatccttatgcacatgacattcgagagccactgtgttatttcctagtgcaactgtgactcagtgtaatctgctttctttccactcctctgatttctgtgtgtaaattttcatgacaaaagttagacaaaataccatggactgaagttagatatagagcaactcatgtctcttttagttgctggtgattgcaaatntatctccatggccaaattgcttttgaggcactatatgtga

SEQ ID NO: 548 - DNA, 1000 bp, Homo sapiens
atttatctgtattgtgggaaggttaaagaagtgagaactctttccttgcttagtggtggcctgtgctctggaggtagagaggaagacacaggggccatggaggtgggacttacaggtgtggtacaggttgtataatcatgatggtgaccctgcatggagaagggaaagcttgaccttttccttggctcagggctatgcaaatagggctggcccatttctgagaggggaaggtagctgatatgcaggtgtgattccctagggcccagaaagacctgcctgccttctgcctttgttgtcatgcttcatgaggcctgaaatgttcactggtggttatttctctggttctcagctttagctctagaaagcccctattgaaatgacatgccacttggaagatagcaggaccatttacttatattttcacagactgctttaatctgctactctggggatggcacacaaaaagatttagttgatgggagggaggttaggcccctttgtgggccacaaagaagaatctggggagcccagggagactattctgggggtagaagtgaggaggaaaggctctaaagacaaactggacctatgtcacagttccgagggctgtcctccagaatacattgttttcctgaaattctccagccccttccatcattttcctctcagtgaatgtccagtgctgaataactgcccccttagtcacaggactggactgcagcagtgctgcaggtggtgaggctcagtggcacaagtggctctgggagggaatcttgatgtcggattctgtagctgcaccagcagagggggaagagggagataattacccacctctgagtctgagatccccctacccccagtgcattcttctgccaggagcaggatcattagaataagtgagacttagcttagctcattcaactccttgccaggccccatgcaaagctttcaaactttcaaatatacgatcatttctagagactatgttgggatcccctgc

SEQ ID NO: 549 - DNA, 1000 bp, Homo sapiens
gtgaggagtcagtccaagaggtaagtagacatactcagctgcaaccatctgcagagggcccacattggcagcaaaaggaaatagccaagactcacaggagcacaacagccagtcaggtttgggattcacttctctgatactgtgccaaagttggtggactcagccattctgaaactcactgttcacttggggcctgctttgcacaacaaaacaaatagccctgttttgctttccatgtctgaggcagaaaaataaaaatggcaatattttgagtgtttttacattgggaatttctggtccatagataattatttcagatacccctgtgtaatcttttcagagctgttgaaaactgtggaataggggataattagggctcaagagatttcattaatggttaaaggatcattagaaggacacgtactgtatccctcttcttatttctcttcctgcactaaaacaactcctggcttgctaccatacttccgcacccatgtgcaattttcacttagcaaaaggtcaagtctaagtagaatctatgaagttgggattgattctgattggtaataatgctagctagcaagcattgaaaatttgtaccaggttttctgttaagtagtctgcatgcactatctcaatgattcttaaggagtggtccatagatcactggctttacaaacattgacgcatggtggtgggtgtgggcaatgaaaaggcagattcctagattctactctagatccatgggatcagcatcctgtagtgggagccagggatctaccattttagcaggtgccttgggtcatcatccttatgcacatgacattcgagagccactgtgttatttcctagtgcaactgtgactcagtgtaatctgctttctttccactcctctgatttctgtgtgtaaattttcatgacaaaagttagacaaaataccatggactgaagttagatatagagcaactcatgtctcttttagttgctggtgattgcaaat

SEQ ID NO: 550 - DNA, 1000 bp, Homo sapiens
tatctccatggccaaattgcttttgaggcactatatgtgatatttatctgtattgtgggaaggttaaagaagtgagaactctttccttgcttagtggtggcctgtgctctggaggtagagaggaagacacaggggccatggaggtgggacttacaggtgtggtacaggttgtataatcatgatggtgaccctgcatggagaagggaaagcttgaccttttccttggctcagggctatgcaaatagggctggcccatttctgagaggggaaggtagctgatatgcaggtgtgattccctagggcccagaaagacctgcctgccttctgcctttgttgtcatgcttcatgaggcctgaaatgttcactggtggttatttctctggttctcagctttagctctagaaagcccctattgaaatgacatgccacttggaagatagcaggaccatttacttatattttcacagactgctttaatctgctactctggggatggcacacaaaaagatttagttgatgggagggaggttaggcccctttgtgggccacaaagaagaatctggggagcccagggagactattctgggggtagaagtgaggaggaaaggctctaaagacaaactggacctatgtcacagttccgagggctgtcctccagaatacattgttttcctgaaattctccagccccttccatcattttcctctcagtgaatgtccagtgctgaataactgcccccttagtcacaggactggactgcagcagtgctgcaggtggtgaggctcagtggcacaagtggctctgggagggaatcttgatgtcggattctgtagctgcaccagcagagggggaagagggagataattacccacctctgagtctgagatccccctacccccagtgcattcttctgccaggagcaggatcattagaataagtgagacttagcttagctcattcaactccttgccaggccccatgcaaagctttcaaactttca

SEQ ID NO: 551 - DNA, 1000 bp, Homo sapiens
  misc_feature 191: n = A,T,C or G
gcaatatgttgccaaagttttcctggcaatagatcaaagtctgtaatataccagcacatcagctttgcagagctcagacaatgagaaaacaggtaggggtgggagaaagcacttgcaattaattttggagtcagattttgatagaaaagtagaaagaggataggactaattgacttctgaaagaattacangtggctggtgtgccccatgactcacactgtaatctaaatactttgggaggccaaggtgggagggtctcatgaggccaggggtttgagatcagcctggggaacatagtgagaccctgtctctacaaaaaataaaaaaaattagccaggcttagtggcatgtgcctatgatcccagctgcttgggaggttgaggtgggaggatcacttgcaactgggaggttgaggctgcagtgaaccgtgttcacaccactgcactccagcctggacaacagagcaagatcctgcctcaaaaacaaaaacaaaaacaaaaaaaaagaaagacaaaaaagaattgcaagcggccaatacataagagaagatgcctaacacctaaccccccaattagcattgtgattataaagataacaatgctatcatttccccacatcattttggcagaaatgtgaatggatggttaaactcggtgtgcctgtgagtttgatgaaatggatgtgctcatacaactacctgatacaaccttttggagggcaggtggctgatacttactgaaatgtgaaatgtataatcttcttgcccagaaattctgggtctaggacttatcctaagaagacaactatacaaatgtaaaaatacatttatgtagtatgtttgcaaaagcatattcatggggaaaatgagaaataactttaatgtttatcaatagagaactggtatagtaaattatgataaatacctactgtgaaatcctgcatagtcaataaaatgatggtgtaaagcttcatatattaatgtgaaaaattatttaatggt

SEQ ID NO: 552 - DNA, 1000 bp, Homo sapiens
caaaacaggttatgaaacacaacaatcacatttctatacagtcatattactagaaatatgggaagttgttaatttaaatctgaacagttagaatttcaggctacctttacttcctttgctatttaactgtttcctctcccacctatcaactctatgtccttagggaaacttatttaacctttctcactcttggtgaaaatggagataataccaaactcttagaggttgttgtgagaatcaagcaataaaatacatgtcaagcacctagtaaaaaatgtattttgatttttttttgtcatacacagtttcctttttttctttcattatgtgagtacaaacagctgtgttcctatgcccagattcaaagagagaaagctaagtgggcttttgaataacttccacttattttaatgcagggaaagctctagttccaaatatgtggaacagtattttcctaaggctgcaatgtgtcagaaaaagaccatattgagtcattgttttctgaagccaagacaggagattgagagacggatgctgatgggcagcctaaaataatatttcattcttgtcatccttaggcagtttaagaccaagtcattttggatagatctacagtttccctctcggtttggaagaacaaagcttttgttatttatgttcttaaacaacagcgctttgtcctatactcaggagcgtgcaaagcaaacagaagatttcctgaacggccatcccatttatggtgaggagtcagtccaagaggtaagtagacatactcagctgcaaccatctgcagagggcccacattggcagcaaaaggaaatagccaagactcacaggagcacaacagccagtcaggtttgggattcacttctctgatactgtgccaaagttggtggactcagccattctgaaactcactgttcacttggggcctgctttgcacaacaaaacaaatagccctgttttgctttccatgtctgaggcagaaaaataaaaatgg

SEQ ID NO: 553 - DNA, 1000 bp, Homo sapiens
  misc_feature 304: n = A,T,C or G
tattgtaaagaaaaagctagataccataagagctggataccagcccagtgttgctgtttggatttgatcatactctcttgagtacaggaacaagagggcagcctaacattgtccctgaagccctctgcccacagccagtcagatccatgtccaaccttagcagctaggatgctggccatccctgtggcccaggccccatttgtacaagttctgggactggggtgaaggtattcttgttataatgcctttttaacacaattctggccttttgggagagagagtcaatgttttacactctggggantcaacttgtgctcggattcacctttggcaagggtcctttagtggaatggactctgcccagggagtcagtggactgctgtttgctggttgattttagacaagttactttatgtttgtgggcctcattttcctctgagcaaagacatctctaacctgagtcacagcacaatctttgtggtctgactctgtctggggcatggaaaattgtgtgtgtgtgtgtgtgtgtgtgtgtgtgtgtgcatgtgtgtgtctccagtcactggttctggggatgttcctccaaactgttcttgccttctttctgttatccaaacttttctgtgcagaagaacaagatttaagtttgaatggatcattgtttcttttcggctaaacaactgctgatagtcagaggatgacctatttctgaagcagacgaccaaggagaaatttatggatttctattctttagacttaaccagtgttccttcttggaacatatgttatggaacttgactaatcgccctggcaatatgttgccaaagttttcctggcaatagatcaaagtctgtaatataccagcacatcagctttgcagagctcagacaatgagaaaacaggtaggggtgggagaaagcacttgcaattaattttggagtcagattttgatagaaaagtagaaagaggataggactaattgacttctgaaagaattaca

SEQ ID NO: 554 - DNA, 1000 bp, Homo sapiens
gtggctggtgtgccccatgactcacactgtaatctaaatactttgggaggccaaggtgggagggtctcatgaggccaggggtttgagatcagcctggggaacatagtgagaccctgtctctacaaaaaataaaaaaaattagccaggcttagtggcatgtgcctatgatcccagctgcttgggaggttgaggtgggaggatcacttgcaactgggaggttgaggctgcagtgaaccgtgttcacaccactgcactccagcctggacaacagagcaagatcctgcctcaaaaacaaaaacaaaaacaaaaaaaaagaaagacaaaaaagaattgcaagcggccaatacataagagaagatgcctaacacctaaccccccaattagcattgtgattataaagataacaatgctatcatttccccacatcattttggcagaaatgtgaatggatggttaaactcggtgtgcctgtgagtttgatgaaatggatgtgctcatacaactacctgatacaaccttttggagggcaggtggctgatacttactgaaatgtgaaatgtataatcttcttgcccagaaattctgggtctaggacttatcctaagaagacaactatacaaatgtaaaaatacatttatgtagtatgtttgcaaaagcatattcatggggaaaatgagaaataactttaatgtttatcaatagagaactggtatagtaaattatgataaatacctactgtgaaatcctgcatagtcaataaaatgatggtgtaaagcttcatatattaatgtgaaaaattatttaatggtacaaaacaggttatgaaacacaacaatcacatttctatacagtcatattactagaaatatgggaagttgttaatttaaatctgaacagttagaatttcaggctacctttacttcctttgctatttaactgtttcctctcccacctatcaactctatgtccttagggaaacttatttaacctttctcactct

SEQ ID NO: 555 - DNA, 1000 bp, Homo sapiens
tctcaatgaaagttcatgaaattctgtagaggaatcagctgagtctagaaataagctgttccttattgtttcctctgtttccttatatataaagagtgggtaaaaagaagcaccttggaaagtcattgtgagattaaatggcataatgcatgcacatctcctggcacaaactaatcaccactgttgtgttctaagccagtttcctaaatacacagatccagttgttttttaagtctcagtgtgaactgtttattctgtttggcccatgtggatatctaaagggttcacaaaaatgctttcaaattgataaaatatggaggaagccgcttttctagtcttcatcaaggatctgcgttgggtggaatagaatctttgtttgggtttggtaagagtttcatgatgcaggattttatagagagggagctaatgccattgggtggctgatcacctaggtggaatgaatgtggggccactcatccatgcatttttctgcaggtgagatgggataggtagcccttgtacagttcttctgtcagagatcttggtcacatttgagtctctgctgggctaaggcagaagcccttataggaggataggaccactacctggccaggcttggttttctttagctcagagcctggaattggctaaatttgaacagacaagattaaaaaaaacaagctgattatacaagtgatattgtaaagaaaaagctagataccataagagctggataccagcccagtgttgctgtttggatttgatcatactctcttgagtacaggaacaagagggcagcctaacattgtccctgaagccctctgcccacagccagtcagatccatgtccaaccttagcagctaggatgctggccatccctgtggcccaggccccatttgtacaagttctgggactggggtgaaggtattcttgttataatgcctttttaacacaattctggccttttgggagagagagtcaatgttttacactctgggga

SEQ ID NO: 556 - DNA, 1000 bp, Homo sapiens
  misc_feature 697: n = A,T,C or G
tcaacttgtgctcggattcacctttggcaagggtcctttagtggaatggactctgcccagggagtcagtggactgctgtttgctggttgattttagacaagttactttatgtttgtgggcctcattttcctctgagcaaagacatctctaacctgagtcacagcacaatctttgtggtctgactctgtctggggcatggaaaattgtgtgtgtgtgtgtgtgtgtgtgtgtgtgtgtgcatgtgtgtgtctccagtcactggttctggggatgttcctccaaactgttcttgccttctttctgttatccaaacttttctgtgcagaagaacaagatttaagtttgaatggatcattgtttcttttcggctaaacaactgctgatagtcagaggatgacctatttctgaagcagacgaccaaggagaaatttatggatttctattctttagacttaaccagtgttccttcttggaacatatgttatggaacttgactaatcgccctggcaatatgttgccaaagttttcctggcaatagatcaaagtctgtaatataccagcacatcagctttgcagagctcagacaatgagaaaacaggtaggggtgggagaaagcacttgcaattaattttggagtcagattttgatagaaaagtagaaagaggataggactaattgacttctgaaagaattacangtggctggtgtgccccatgactcacactgtaatctaaatactttgggaggccaaggtgggagggtctcatgaggccaggggtttgagatcagcctggggaacatagtgagaccctgtctctacaaaaaataaaaaaaattagccaggcttagtggcatgtgcctatgatcccagctgcttgggaggttgaggtgggaggatcacttgcaactgggaggttgaggctgcagtgaaccgtgttcacaccactgcactccagcctggacaacagagcaagatcctgcctcaaaaacaaaaacaaaa

SEQ ID NO: 557 - DNA, 1000 bp, Homo sapiens
ctgccttataatcatagcaataattcccatttccaaatgcctgccatgggtcaggttcttgctatgtctttggcacatattatctttaagtctcatcaactctgcaaggaaggaacaattgtcattcacagtttacagctgagaaagctgaggctcagattatttcagtaagctgcctgaagtcatgcagctaagtggcaaagccaggatataaacttcatatgtatgttcacaaagtccccgcttagtcctccatggaatttttagagttatttaaaatgacatgtgtgaaagtgttttgaaaatagcaaagttccttgtaaatgcatgttattattatcatactgatgaatataaattacttaacatctatttaccaagttccttatagatatttagcactgagtcagttttcattttggacaatctatggaattagttatttctctaatgtagtattacataagatgcattataaataaatcttaaatattttcaagtggaaatttcttccatccttgggaccaggttcttccttcttctccttcttcttcttttttatttttatttttttgagactgggtctctgtcacccagtctgggatgcagtggcacaatcatggatggctcactgcagcctcgaccttttgggttcaagtgatcctttctcctcagcctctccagtagctgggaccacaggtatggccaccacacccagctaatttttttatttttctagagatggtgtctcactatgttgcctaggctgatctcaaactcctgggctcaagttatcctgtttcaatctccctaagtgctgggattagaggtatgagccaccacacccagcctgggttttagtttctttttgatcatatttggagaaaaaaagaaaagaagcaaatttgctaatcaaaattgagtgaatgtttcaagaaacaaaaccaattaaatgtagtccaaccttgagaatcagcaagtaaaaacctctgaagccaag

SEQ ID NO: 558 - DNA, 1000 bp, Homo sapiens
gggctaacaggaaaactgaaggagaggagagaaatataccataagcattttcaaacctctgcttcaaattcttgtatttataaatggtctgggccagcagtgcaactctccctgtctcgctctttgttgtttattttttggagtctttaatgaccaatcgggttgctgaaatttacttgaagagtttattcttgattctgaggtataagattttctgtgtgaagatggctgggaatccacacaactctcctaaaataagcaccaagttttggaaagaattttctcttgtggaaaacatccatttccaaagagagccatcagcatgagattgcttttttttctttttaaccgcccccaacccaaggagaaagctgaggggagtcagtctgtgaagcagccaggaatcaactttcatgacagttttaacattcaaggcagacttttcccttggtcttttggaagaactgctgaaatctcaatgaaagttcatgaaattctgtagaggaatcagctgagtctagaaataagctgttccttattgtttcctctgtttccttatatataaagagtgggtaaaaagaagcaccttggaaagtcattgtgagattaaatggcataatgcatgcacatctcctggcacaaactaatcaccactgttgtgttctaagccagtttcctaaatacacagatccagttgttttttaagtctcagtgtgaactgtttattctgtttggcccatgtggatatctaaagggttcacaaaaatgctttcaaattgataaaatatggaggaagccgcttttctagtcttcatcaaggatctgcgttgggtggaatagaatctttgtttgggtttggtaagagtttcatgatgcaggattttatagagagggagctaatgccattgggtggctgatcacctaggtggaatgaatgtggggccactcatccatgcatttttctgcaggtgagatgggataggtagcccttgtacagttc

SEQ ID NO: 559 - DNA, 1000 bp, Homo sapiens
  misc_feature 33, 1000: n = A,T,C or G
aagggctaatatccagaatctacaatgaactcnaacaaatttacaagaaaaaaacaaacaaccccatcaaaaagtgggcgaaggacacgaacagacacttctcaaaagaagacatttatgccaccaaaaaaacacatgaaaaaatgctcaccatcactggccatcagagaaatgcaaatcaaaaccacaatgagataccatctcacaccagttagaatggcgatcattaaaaagtcaggaaacaacaggtgctggagaggatgtggagaaataggaacacttttacactgttggtgggactgtaaaccagttcaaccattgtggaagtcagtgtggcgattcctcagggatctagaactagaaataccatttgacccagccatcccattactgggtatatacccaaaggactataaatcatgctgctataaagacacatgcacacgtatgtttattgcggctctattcacaatagcaaagacttggaaccaacccaaatgtccaacaatgatagactggattaagaaaatgtggcacatatacaccatggaatactatgcagccataaaacatgatgagttcatgtcctttgtagggacatggatgaaattggaaatcatcattctcagtaaactatcgcaagaacaaaaaaccaaacacctcatattcttactcataggtgggaattgaacaatgagaacacatggacacaggaaggggaacatcacactctggggactgttgtggggtgggggaagcggggagggatagtattaggagatatacctaatgctaaatgatgagttaatgggtgcagcacaccagcatggcacatgtatacatatgtaactaacctgcacattgtgcacatgtaccctaaaacttaaagtttaataataataaaattaaattaaaaaaaaaaagaaaacctgtagctctggtatcatagtggctgtagtgactggttgaatgatttaatctatttcagcctcagttgccn

SEQ ID NO: 560 - DNA, 1000 bp, Homo sapiens
agctgttagaggagttaattatatcagtcctgccttataatcatagcaataattcccatttccaaatgcctgccatgggtcaggttcttgctatgtctttggcacatattatctttaagtctcatcaactctgcaaggaaggaacaattgtcattcacagtttacagctgagaaagctgaggctcagattatttcagtaagctgcctgaagtcatgcagctaagtggcaaagccaggatataaacttcatatgtatgttcacaaagtccccgcttagtcctccatggaatttttagagttatttaaaatgacatgtgtgaaagtgttttgaaaatagcaaagttccttgtaaatgcatgttattattatcatactgatgaatataaattacttaacatctatttaccaagttccttatagatatttagcactgagtcagttttcattttggacaatctatggaattagttatttctctaatgtagtattacataagatgcattataaataaatcttaaatattttcaagtggaaatttcttccatccttgggaccaggttcttccttcttctccttcttcttcttttttatttttatttttttgagactgggtctctgtcacccagtctgggatgcagtggcacaatcatggatggctcactgcagcctcgaccttttgggttcaagtgatcctttctcctcagcctctccagtagctgggaccacaggtatggccaccacacccagctaatttttttatttttctagagatggtgtctcactatgttgcctaggctgatctcaaactcctgggctcaagttatcctgtttcaatctccctaagtgctgggattagaggtatgagccaccacacccagcctgggttttagtttctttttgatcatatttggagaaaaaaagaaaagaagcaaatttgctaatcaaaattgagtgaatgtttcaagaaacaaaaccaattaaatgtagtccaaccttgaga

SEQ ID NO: 561 - DNA, 1000 bp, Homo sapiens
  misc_feature 34: n = A,T,C or G
aaagggctaatatccagaatctacaatgaactcnaacaaatttacaagaaaaaaacaaacaaccccatcaaaaagtgggcgaaggacacgaacagacacttctcaaaagaagacatttatgccaccaaaaaaacacatgaaaaaatgctcaccatcactggccatcagagaaatgcaaatcaaaaccacaatgagataccatctcacaccagttagaatggcgatcattaaaaagtcaggaaacaacaggtgctggagaggatgtggagaaataggaacacttttacactgttggtgggactgtaaaccagttcaaccattgtggaagtcagtgtggcgattcctcagggatctagaactagaaataccatttgacccagccatcccattactgggtatatacccaaaggactataaatcatgctgctataaagacacatgcacacgtatgtttattgcggctctattcacaatagcaaagacttggaaccaacccaaatgtccaacaatgatagactggattaagaaaatgtggcacatatacaccatggaatactatgcagccataaaacatgatgagttcatgtcctttgtagggacatggatgaaattggaaatcatcattctcagtaaactatcgcaagaacaaaaaaccaaacacctcatattcttactcataggtgggaattgaacaatgagaacacatggacacaggaaggggaacatcacactctggggactgttgtggggtgggggaagcggggagggatagtattaggagatatacctaatgctaaatgatgagttaatgggtgcagcacaccagcatggcacatgtatacatatgtaactaacctgcacattgtgcacatgtaccctaaaacttaaagtttaataataataaaattaaattaaaaaaaaaaagaaaacctgtagctctggtatcatagtggctgtagtgactggttgaatgatttaatctatttcagcctcagttgcc

SEQ ID NO: 562 - DNA, 1000 bp, Homo sapiens
  misc_feature 1: n = A,T,C or G
nagctgttagaggagttaattatatcagtcctgccttataatcatagcaataattcccatttccaaatgcctgccatgggtcaggttcttgctatgtctttggcacatattatctttaagtctcatcaactctgcaaggaaggaacaattgtcattcacagtttacagctgagaaagctgaggctcagattatttcagtaagctgcctgaagtcatgcagctaagtggcaaagccaggatataaacttcatatgtatgttcacaaagtccccgcttagtcctccatggaatttttagagttatttaaaatgacatgtgtgaaagtgttttgaaaatagcaaagttccttgtaaatgcatgttattattatcatactgatgaatataaattacttaacatctatttaccaagttccttatagatatttagcactgagtcagttttcattttggacaatctatggaattagttatttctctaatgtagtattacataagatgcattataaataaatcttaaatattttcaagtggaaatttcttccatccttgggaccaggttcttccttcttctccttcttcttcttttttatttttatttttttgagactgggtctctgtcacccagtctgggatgcagtggcacaatcatggatggctcactgcagcctcgaccttttgggttcaagtgatcctttctcctcagcctctccagtagctgggaccacaggtatggccaccacacccagctaatttttttatttttctagagatggtgtctcactatgttgcctaggctgatctcaaactcctgggctcaagttatcctgtttcaatctccctaagtgctgggattagaggtatgagccaccacacccagcctgggttttagtttctttttgatcatatttggagaaaaaaagaaaagaagcaaatttgctaatcaaaattgagtgaatgtttcaagaaacaaaaccaattaaatgtagtccaaccttgag

SEQ ID NO: 563 - DNA, 1000 bp, Homo sapiens
tgggcttttcagctgcttcctgactgggctagagacaggcagcataacttttaatctctccaaaagcctgccaactggcaaagagatacatgtattagataagatggtggatctcgatttatatatgtatgaatgcagactgaattaaaatggcaccctaagggagaagccaaggaccaaatcaggagaccctctaactgagtcagaaatcaaggccaggatttataggatgaacatttttaagtgtacattagaatgtaaagtaggtatttgtaattgaagtactatgcttattttatttccataaacctaaggtctggcttcgaagtggcctcagggtatatccgtcagcactgagccttgtaaatttgcctgctaaatcaaacctatgatgaaaagaaccaggcaaataacactgtcttgcagtgtgcaagtcccgtggctgtattatagagtgctcagctcagtgtttcacagtggagaagaacgtacgttgatatgctttctgggtttgagagctcttccttcttcatccagaagacagagctgggtagagaaaaggataaccagcaagacaaaggctttatcccaatattatatgtttaaaactcaaagagatatggtgaaaatgggactttattaaatttgcctgattggaaacaaacatgcaaattgtacaagattcctaaatgtgccaaaatggcaaggagagagccctgacgagcatggagaatagtgagtaatgcttatgtcctaacagtgccccttgccttcattgacctttggaaatattgtgaaaaagtcaaccttttctattctgtctgtatagtcttacagtgtttcctctctttttctccctctagggagttatccaaagcccccttcacaagaaatgctagctttcaggaataatcaatcaagcacacctttgagcaaatgtaagatttatgttcattctatttagatatttgattttgacattgtatcctttattttggaa

SEQ ID NO: 564 - DNA, 1000 bp, Homo sapiens
aaaatgaatgtcacctacatgcagacagatgaggcattttatgcttttgttgggggaggataggtttaggggagctctcccatttgcaacccggctttaaaccccacgtggcatgaagaaatcaattaaacagacagaaactcttctgggattgggaatctggcttctcatttaaaagaatatccccatttttctaaccataataaattttaattttcaagtaaaagccattacgtcaattttaatgtcaaatacattttaaaaagaagatgcagactgttgaaaagatggtggaaatgattacaacctaagcttggagcttactgaagtcaatcaacttcaacctggagcttgctgcagttccgactgcacttagatggttttgctttagtttccccattttagtgtagcagaggctgttttgttacctgatctttttttgtagagagaatgaaactgcctgagggacaatacagtgcactggagagggatgaaataaagtctcaagagctgcttgtactataccacctacctcaaacagcagatgttacagaactgcttttaaaaaaatgttgcctttcacatgtcatgctaaaaatatatacctaaaaagacctaaaaaaaaaaaccttaaaagaactagagaagcaggctgtagttatacaaaagctatatgcaagatcatggaagcaaaaaaaaaatgcataaagacatattagagctttcttaagttccaagggagcttttgataatacattcaaaacataaatgggaaagtcatcagagaattgcatagtccccaggagactgcagaaggctttgaaatggatttaataacattgatgggtcggataggaagcccttattccctttgacttatcatctttcttttctttttaaaattcactttcaggaaatagttacatgatcaactctacctggctgactcaaatttggttctcggtttgaactctagttatctgtatatcttacagctgtc

SEQ ID NO: 565 - DNA, 1000 bp, Homo sapiens
  misc_feature 493, 607: n = A,T,C or G
tatagcatttttgttcataatatgaaaactaggaatcaaagtgtctaagaattacagttttaaaatatcacttaggccgggtgcggtggctcaagcctgtaatcccagcactttggaaggctgaggcaggtggatcgcctgaggtcaggagttcgagaccagcctggccaacatggcaaaaccctgtctctactaaaaatacaaaaatcagctaggcatagtggcgggtgcctgtagtcccagctactcaggaggctgaggcaggagaatagcttcaacatgggaggcagaggttgagccgagattgtgccactgcactccagcctgggcgacagggtgaaactccatgtaaaaaaaaaaaatcacttaatattatgaaaaactgtttatgacaagacatgatgtgaaaataatcatggcatatatagcataatcacaatttgtttatgtgtgaacagaataacatgttaacagaggttatcttttgctaatnggactagaggtgtttcttttcctttttattttttctttttgtatttttcaaattgtctaaaagactatatatttttataatcagaagaaatattgcaaccatattttgtcccanttgaactatgatttacttacgggaagtcctatccttgtttcttagtttctacattttaaaatgtctcatcattcattttggctgaaagttaaaatgcaatctcagttatttcacgttaattcaattacaagcccttctcttcccacagtatcatttcatcttaaaccttcatactcagcctcctttgcaactctggcctctcttgctttccattcctttttgttctttctctgattaaaaaaaaatactaaattctgtctgcttttctttgacagcattagccttttttctcctctgctcagaatataatttttgctattcagtttttcaaatatttaccactgttccctttgtttctttatcctggtttttaattttgtaaggtagaggaag

SEQ ID NO: 566 - DNA, 1000 bp, Homo sapiens
attcatggaatagtctgttccaaacctcagagcctcagtagtgcttttgcattaattaaaaagtatgtattctttttgggatttcccaaagtattttcccattatatcaggaacacatgtgtatatgtgcatacatagggtatgcatgagaatgagtgtattcacgtgtgcatgtatgcattcatgtttgtgtgcatgttggtgcatacatgtgcaagttggtgtgcacttgtgagtgaatacatgttccagttcttccagaacaggaactgtgtcctttcctatatgccctacgcaagtagacactgcaatgatgctgactgcctgtttgcctgtctctgtatagccacctttcagagcttgccatctggatctcagacagtatgcagaggagaggaatgttctaatccaccctggtaccaacaggctggcatctgtactttgaaagctttgatgaagaagatgcaaattgtgttggctgtgtgggcttttcagctgcttcctgactgggctagagacaggcagcataacttttaatctctccaaaagcctgccaactggcaaagagatacatgtattagataagatggtggatctcgatttatatatgtatgaatgcagactgaattaaaatggcaccctaagggagaagccaaggaccaaatcaggagaccctctaactgagtcagaaatcaaggccaggatttataggatgaacatttttaagtgtacattagaatgtaaagtaggtatttgtaattgaagtactatgcttattttatttccataaacctaaggtctggcttcgaagtggcctcagggtatatccgtcagcactgagccttgtaaatttgcctgctaaatcaaacctatgatgaaaagaaccaggcaaataacactgtcttgcagtgtgcaagtcccgtggctgtattatagagtgctcagctcagtgtttcacagtggagaagaacgtacgttgatatgctttctgggtttgaga

SEQ ID NO: 567 - DNA, 1000 bp, Homo sapiens
  misc_feature 887: n = A,T,C or G
tgaatatttttatagaaggaagctcataaattttcatgtgattctcaaaggagttcatgattccaaaaagtctaagaacttctgtgcttattctgaggttaactgtgcaccacaaatactaaattctatttggggtggtgtcttgacattgtattttgtatccctatcaatctagcagaagatttttttttttaaataaagaaaatgctcactcttggctaggatgtggtgaaacaaaacttcctatattgtcagtggcagtataaattggtatgaattttctaaaaagacattttccactttttgcaccagataccaaatttgtctttcaataatatattctaagaaagcaataagaaaaaggaagtaattagaaattatgtataaagatatttatagcatttttgttcataatatgaaaactaggaatcaaagtgtctaagaattacagttttaaaatatcacttaggccgggtgcggtggctcaagcctgtaatcccagcactttggaaggctgaggcaggtggatcgcctgaggtcaggagttcgagaccagcctggccaacatggcaaaaccctgtctctactaaaaatacaaaaatcagctaggcatagtggcgggtgcctgtagtcccagctactcaggaggctgaggcaggagaatagcttcaacatgggaggcagaggttgagccgagattgtgccactgcactccagcctgggcgacagggtgaaactccatgtaaaaaaaaaaaatcacttaatattatgaaaaactgtttatgacaagacatgatgtgaaaataatcatggcatatatagcataatcacaatttgtttatgtgtgaacagaataacatgttaacagaggttatcttttgctaatnggactagaggtgtttcttttcctttttattttttctttttgtatttttcaaattgtctaaaagactatatatttttataatcagaagaaatattgcaaccatattttgtccca

SEQ ID NO: 568 - DNA, 1000 bp, Homo sapiens
ttgaactatgatttacttacgggaagtcctatccttgtttcttagtttctacattttaaaatgtctcatcattcattttggctgaaagttaaaatgcaatctcagttatttcacgttaattcaattacaagcccttctcttcccacagtatcatttcatcttaaaccttcatactcagcctcctttgcaactctggcctctcttgctttccattcctttttgttctttctctgattaaaaaaaaatactaaattctgtctgcttttctttgacagcattagccttttttctcctctgctcagaatataatttttgctattcagtttttcaaatatttaccactgttccctttgtttctttatcctggtttttaattttgtaaggtagaggaagcattcatggaatagtctgttccaaacctcagagcctcagtagtgcttttgcattaattaaaaagtatgtattctttttgggatttcccaaagtattttcccattatatcaggaacacatgtgtatatgtgcatacatagggtatgcatgagaatgagtgtattcacgtgtgcatgtatgcattcatgtttgtgtgcatgttggtgcatacatgtgcaagttggtgtgcacttgtgagtgaatacatgttccagttcttccagaacaggaactgtgtcctttcctatatgccctacgcaagtagacactgcaatgatgctgactgcctgtttgcctgtctctgtatagccacctttcagagcttgccatctggatctcagacagtatgcagaggagaggaatgttctaatccaccctggtaccaacaggctggcatctgtactttgaaagctttgatgaagaagatgcaaattgtgttggctgtgtgggcttttcagctgcttcctgactgggctagagacaggcagcataacttttaatctctccaaaagcctgccaactggcaaagagatacatgtattagataagatggtggatctcgatttata

SEQ ID NO: 569 - DNA, 200 bp, Homo sapiens
gttgagccgagattgtgccactgcactccagcctgggcgacagggtgaaactccatgtaaaaaaaaaaaatcacttaatattatgaaaaactgtttatgacaagacatgatgtgaaaataatcatggcatatatagcataatcacaatttgtttatgtgtgaacagaataacatgttaacagaggttatcttttgctaat

SEQ ID NO: 570 - DNA, 200 bp, Homo sapiens
  misc_feature 114: n = A,T,C or G
ggactagaggtgtttcttttcctttttattttttctttttgtatttttcaaattgtctaaaagactatatatttttataatcagaagaaatattgcaaccatattttgtcccanttgaactatgatttacttacgggaagtcctatccttgtttcttagtttctacattttaaaatgtctcatcattcattttggctgaa

SEQ ID NO: 571 - DNA, 200 bp, Homo sapiens
aaatgttaataaatataacctaattttaaaagaaatatctccaaagagtgtagccttctaggagactgagtacaaaaaaaagaaaggggtggagcaggacagagtatgaaagaagactgcaagaaaaggtcaggtacaactgggagagaaaaatgcagaagctgtgggcatgcaaggccagaagtgtagccaagaagcag

SEQ ID NO: 572 - DNA, 200 bp, Homo sapiens
aggtgaagtcaaaggtggatgaagggaaagaaagatgaaatgagagaaaaaatcctaggagtcttagcattggagggggaactcaggtgcgagaaatgatctaataatagttgaatggagagaaaatcaatgtatggtcaatcttcattatcacagattatgtgtttgcaaatccacctacttgctaaaatttatctgta

SEQ ID NO: 573 - DNA, 1000 bp, Homo sapiens
  misc_feature 290: n = A,T,C or G
ctgtaacacagggtccataatttctaccttacaatgctgttttaagaataaacgaagtgggaaatgagttagtatcatattcatatatggcagccattattattattattattattattattattaaatttctatagtatgttattgcctaagtttgttcatagaataatgtattggcaaataatattccagtaggagaattattcttataaaataaattaaagtaacttactttattctttagagtttaccaagataggtatatttagtgaacatgggagtcaacagcntataataaattctgtattcttaatttaacaagcatttattgagtctctaacaacaagcttagcagtgtttaaaacaccatggcagggctgggcatggtggcttatgcctgtaatccctcactttgggaggccaaggtgggaggatcacttgaggtcaggagttcgagaccagtgtggtcaacatagcaaagcatcgtctctactgaaaatacaaaaattatctcggcatggtggcaagcacctataatcccagctacttgggaggttgaggcaggagaattgcttggatcagggaggtggaggttgcagtaagaactcgccactgcactccactccagcctgggcgacagtgcaagactgtctcaaagaaacaaaacaaaacaaaacaaaacaaaaaaactaccacggcaggaggaatttcaagcatgtgaaagctgttaccaaggataattgtgcctccatcacaggtgtctgcctctccccatctctgctgtcagtgctggaacccacacagtatcacttgtctgggttttcacagtagctgccttaccacttaactcccatttattgtctctccaatccatcctttatactttttccagaaattatctttctaaaacaaaatcatgccatcatcattcacacattcatagacagctgttgtctgtggaaaacacttcagcctcattaagatgtaaggccctccgtac

SEQ ID NO: 574 - DNA, 1000 bp, Homo sapiens
cttgcccttccagctgtatcacctcctgtttcctttcctgcagcctatactccggccataggactaattgcaaatctccattagtaccgtgtccttcccagctgttattttagctagacatgtttttttagccatttcttgcctctcaaaattgtactcattctttaagatataagagaaacaccatcttatctatagtctccctagatgtagaggatgaattcgagtgttaaaagcaagaggtgggcgttgtagtgttctaaggtagggagactaggtatagaaagaaaccttgagatggaaaccaaggacagagaaacttttgcagaatgctgtctctgtgggctgcctgccctgtctttcagctggaagtggttcttcctttctgtgttctctttctctgatgggctgctgagaattattgcatgtaggaagccagagaatgtctcactgttctcccagcagctgctgcttagggctctcttactccactcttttttgattccctggtctcctgcagagccatttattgtctggaccttccctatacgttgtcttccccttagctcaaggcctggcctctccttatctctcctcagagtttgacttctgatgggatctgttgtgctggaactagctgtgatgtttctcttcttcctgcttcacctatgggttggttcctcagcccttatactggtcccactggcaccagccctgacccgattaattccctttcatcgtcctccatacccaaaggtcctgtcttggaccagggaggctcactgggccaagtattcatcacaaatgttaataaatataacctaattttaaaagaaatatctccaaagagtgtagccttctaggagactgagtacaaaaaaaagaaaggggtggagcaggacagagtatgaaagaagactgcaagaaaaggtcaggtacaactgggagagaaaaatgcagaagctgtgggcatgcaaggccagaagtgtagccaagaagc

SEQ ID NO: 575 - DNA, 1000 bp, Homo sapiens
ctatcaaaacaattctaggaagtatttttctaactcttgaagagagagagagggagcataaaatgtacataaacctaagttaaaagaagtatgtaaaagtatgttaaaaataatgcaaaaagcatatatgcatatattttgcttgaacttgatttccactgacttggagtagttcattctctaagaatctcatgtcatattattttatatctttctcatttgtgaagtcattcaagagatcctgccttgtatgtgttttccagataatttacacttttatttttacatagatgttgattagctgtgtttcattgaatattctcagttttgggtatcagttttcagcaaaacaactaaatgtgacaccttcctactgagcatattgggtctatacgtgtgcatttgacttacgacttatattttcacctaaaaaatattttggatacaatattaaattcttttagcattaatagagtgcttgaaatatgaacttagtgcttttacttttaaaatattttaaaattttgatatttaaaaatttgatattttaaaatattttttctgtactaaaatgcactacaatataatgtgacaattatgaatatggattttagattaagacaaacctgggctggaatagtagctctgttccttactagttgtgtatccttggaaaaacaactccaactttctaagcattagtttccttatctgtaacacagggtccataatttctaccttacaatgctgttttaagaataaacgaagtgggaaatgagttagtatcatattcatatatggcagccattattattattattattattattattattaaatttctatagtatgttattgcctaagtttgttcatagaataatgtattggcaaataatattccagtaggagaattattcttataaaataaattaaagtaacttactttattctttagagtttaccaagataggtatatttagtgaacatgggagtcaacagc

SEQ ID NO: 576 - DNA, 1000 bp, Homo sapiens
tataataaattctgtattcttaatttaacaagcatttattgagtctctaacaacaagcttagcagtgtttaaaacaccatggcagggctgggcatggtggcttatgcctgtaatccctcactttgggaggccaaggtgggaggatcacttgaggtcaggagttcgagaccagtgtggtcaacatagcaaagcatcgtctctactgaaaatacaaaaattatctcggcatggtggcaagcacctataatcccagctacttgggaggttgaggcaggagaattgcttggatcagggaggtggaggttgcagtaagaactcgccactgcactccactccagcctgggcgacagtgcaagactgtctcaaagaaacaaaacaaaacaaaacaaaacaaaaaaactaccacggcaggaggaatttcaagcatgtgaaagctgttaccaaggataattgtgcctccatcacaggtgtctgcctctccccatctctgctgtcagtgctggaacccacacagtatcacttgtctgggttttcacagtagctgccttaccacttaactcccatttattgtctctccaatccatcctttatactttttccagaaattatctttctaaaacaaaatcatgccatcatcattcacacattcatagacagctgttgtctgtggaaaacacttcagcctcattaagatgtaaggccctccgtactcttgcccttccagctgtatcacctcctgtttcctttcctgcagcctatactccggccataggactaattgcaaatctccattagtaccgtgtccttcccagctgttattttagctagacatgtttttttagccatttcttgcctctcaaaattgtactcattctttaagatataagagaaacaccatcttatctatagtctccctagatgtagaggatgaattcgagtgttaaaagcaagaggtgggcgttgtagtgttctaaggtagggagactaggtatagaaagaa

SEQ ID NO: 577 - DNA, 1000 bp, Homo sapiens
  misc_feature 472: n = A,T,C or G
ttaaaggtcaactggttgttcttaaactgtgcagaattttaactctttcattataatggattttaaccaaatggccattttaggaaggagagagactgcatactgtgttttaactttctgacctttttgttcttaaattttttgtaaagttctcagggatttcctatggatggaaagggtctgagaaatcagttctcagctggcatttggaaaagggtggaagtagaaactgagttctttttaaactgctaaatttaggtcagggctttaatacgactgtgcacatcacataagcaatgtctaaatgtcaggctgaatgttctctctcttttaaataagtacttcaagttcgttagtaatagctagccctctgtctctttcttgcttctcctctcacctttgagcaactttttaagttcctttaacagctctgtggagaaaccaccatgtaatgatcaatatttaacccagntggttgacgttagccccgtttctggaatgggtatttcactgggctttggggttttgatgacgttttctccccagtgactgtggatgcatggattaaatttgttggtctgcaaaataccatctgtctaccagccattttgctgtatttcccaaaataaggtaggagactgatgtgtctcaaataagcagggtgaaatttagtcatctgatgatagtttcttgggttgtgcattagtgtcctgatgagcccctagcaactttcaacattatgaagactagtttggaagcctcaaaggcagtatctttcttgaagaaaaaaaaataacaccaggcatttccacaaataccatacacaagtggtcaggtaaaggctgtgggagttcacgcatctgtttaccttgagtgtgtgtatgaactcttgtagttctaactaaaggcaaatggaaactgtatagagtcccattttgtcaagctgacaattcagtatcctcttctttcctggttgctttatagcccactcttagttgtt

SEQ ID NO: 578 - DNA, 1000 bp, Homo sapiens
  misc_feature 337: n = A,T,C or G
tctttctatatttcctacaatttttagctgtgaggctgtgtattcgttgcttaaaaattctgtgcctcatctgcttcacttgcaaaatggggaaaatgtcacaggatccttggggtgttgctttgccagccagaaacctttgtggctaatggtgcctttgcctgagttttgctcgggcccactgggctggttctgcccactcagcctgggcaggctgtgctgggctcacgctactggcccagatcttatgcctgccaagggtgagccaggcacaaaaaggcaaggggtatgtgaacaagggagctgcccattgtgcacagccagtcatgccagctgnagcagggcaggcagctccagatgccgacacaagtgctagctccctgtgaggctgtggctggaccaggtgtaccacagatggcttccactgctggcacccgggaatgtggtggtgcctggaagcttggagacgccaggaactacagagccccaaagagggtgtcacatccctggcttggggagctcccaggtctgggctccctgaagggctgcagttcctctcttcttctctcttctctccctcttctcacctgcaacatggcaagcaaggggtgtgtttcagccctgtttgtgttacagctctttcagtcccaccatttagtgggtcccaagttcttgtcctgtgtcctggaagaatgaggtacagggacaactggagggtgagcaaggcagagaggaactttattgagcgacggtacagctcccaggagacctgaagtgggtagctcctctctgcaggcaggttgtcctgtcaagcctgcagctctcaagagagaggagacccacagtgggtagctcctctctgcaggcaggtcatcccttcaaatgtgcagctctcaggagagagaagacctacagtgggtagctcctctctgcaggccagttgttccaacctctgcccagtctggctgagtccagggagttttatgggcttcagagaagg

SEQ ID NO: 579 - DNA, 1000 bp, Homo sapiens
gaaaataatcattttagggaatagaaagtctctcaacgattggttttgaatctctgggttttaaatccatttactccaagtaggattcagtatttcactctttcactggcagtggattgttttttctcctacatatatggcttgaaagctcttaacaaaggatagtaattaattatttcccagctatttttacctttgacgtattaaaagttggaggaaactatttcatttaacagaatttaaacaaaatgaaaaagttattttccttaaggtattctgctgtgctttttcaaggaaaagcctcctccaaaggcacttttggagacagttaccaaaggaaaatcccacccaccaacagagacactcagcctctaagtttggcttttggaaaatgaacactattcttttttttccaaacaggacgctgtgagatcagtcatgtacactatgaaaataattggtgtgcattagtacaccttgtgccagatttcatgcttgttgaaaggtgattggattcaaaccagcacatttaaaggtcaactggttgttcttaaactgtgcagaattttaactctttcattataatggattttaaccaaatggccattttaggaaggagagagactgcatactgtgttttaactttctgacctttttgttcttaaattttttgtaaagttctcagggatttcctatggatggaaagggtctgagaaatcagttctcagctggcatttggaaaagggtggaagtagaaactgagttctttttaaactgctaaatttaggtcagggctttaatacgactgtgcacatcacataagcaatgtctaaatgtcaggctgaatgttctctctcttttaaataagtacttcaagttcgttagtaatagctagccctctgtctctttcttgcttctcctctcacctttgagcaactttttaagttcctttaacagctctgtggagaaaccaccatgtaatgatcaatatttaacccag

SEQ ID NO: 580 - DNA, 1000 bp, Homo sapiens
  misc_feature 529, 866: n = A,T,C or G
tggttgacgttagccccgtttctggaatgggtatttcactgggctttggggttttgatgacgttttctccccagtgactgtggatgcatggattaaatttgttggtctgcaaaataccatctgtctaccagccattttgctgtatttcccaaaataaggtaggagactgatgtgtctcaaataagcagggtgaaatttagtcatctgatgatagtttcttgggttgtgcattagtgtcctgatgagcccctagcaactttcaacattatgaagactagtttggaagcctcaaaggcagtatctttcttgaagaaaaaaaaataacaccaggcatttccacaaataccatacacaagtggtcaggtaaaggctgtgggagttcacgcatctgtttaccttgagtgtgtgtatgaactcttgtagttctaactaaaggcaaatggaaactgtatagagtcccattttgtcaagctgacaattcagtatcctcttctttcctggttgctttatagcccactcttagttgttntctttctatatttcctacaatttttagctgtgaggctgtgtattcgttgcttaaaaattctgtgcctcatctgcttcacttgcaaaatggggaaaatgtcacaggatccttggggtgttgctttgccagccagaaacctttgtggctaatggtgcctttgcctgagttttgctcgggcccactgggctggttctgcccactcagcctgggcaggctgtgctgggctcacgctactggcccagatcttatgcctgccaagggtgagccaggcacaaaaaggcaaggggtatgtgaacaagggagctgcccattgtgcacagccagtcatgccagctgnagcagggcaggcagctccagatgccgacacaagtgctagctccctgtgaggctgtggctggaccaggtgtaccacagatggcttccactgctggcacccgggaatgtggtggtgcctggaagcttggagacgcc

SEQ ID NO: 581 - DNA, 1000 bp, Homo sapiens; identical to SEQ ID NO: 579

SEQ ID NO: 582 - DNA, 1000 bp, Homo sapiens; identical to SEQ ID NO: 580
  misc_feature 529, 866: n = A,T,C or G

SEQ ID NO: 583 - DNA, 1000 bp, Homo sapiens
tgaactgagggaagcattttttttttttttttcctgcaggtcagagtcccaaagctttagtgcagggttccaaggactcaggagttcaaaacatgctgcttaggctgagctcttggccagatttggagattccaatgtcttctccctttgacagttcctaagaatattttatttggatccttttctttaggtttttctgtctaaacattttattttacctagtgtgaaggggtgagggagggcagattgtttcctttcttcctcctctccccttccccctcccctctcccttattctctgtttataatttaaaaggatgctcactttcattttctcatttgcttccttcacagcaccctgtgaagctgatattgttatccccctttgacagaaggggaaactgcagtttcagtgaatttcagtgacttagtcaagtcactcagttaacagtgctgagagtgaagccctagtgttctgcctttagatctctttttcccagtaccatactgcttttctggtggaggttgtagtatataggatgatgtcagaaaggagaggctgggaagcctgaaacgatcacatcgacaattgaattgtctgttttttctaataaaatagaaaatgttaactaaatatattgccatgcaattcttcaagcatataggactttgggtccttttttgtgtctcagactttaagatgatgtctcctggggagtcatttactatatgcaaggagaatagctgaaaagtcagggtaggccagcagtatttcatgctttgtacttgggcaatatgggtttttctgttggaggttcagcagaggatggtagcaaagtgacatttaattctcctgcttgccaaatcttggtgaggccaaagtgggtgggggaatcggttgtgagtaggtgttaatgacgagtgtctggaccttgacgtcttctcagtcctggagtagggaaaaaggaacagaattagtgctgtttagaagaagctggtga

SEQ ID NO: 584 - DNA, 1000 bp, Homo sapiens
ggaggtctgcttaggaatgagtgcagattaggacaggggcagtgagggaggcccacagagactctggctgcctgtctttcctggcatgtctgtggaatgaccttgctctgccaggactctgggaggaagcctttgattttgggggaatctttaggactatgcacataaccagactttcctgatgggaatctccaagggggcctcctgggccagggccgtgggccagcaggtgtcttcctaacatggtctgtgaatagtgcccaacctaggcggtgccttcttttcctgaatcaagccctttcctcctcagtgccaaagcagaagtggctgggtgggtgaagatctgagtgctggcccggggccacaagccatgggccactacccatattgctgtgagatcctgacctttctcttttctggactcacaagataaagagagtgaatgaggaggaaaatcaaatattgtggcagggaggggctgacaaacacaggcatggccaacagaagtctcccaccaaagtgaggagctgagagaaggatttggggagggaatgtcagaagtctcactcccaggcaaaggattcaacaaaggaaaatccgactctggcttgaatatggtccaggtgtggggttagtagtccatgttactgtctgacatgggagagcattccactgtgatggaaatggggtgggttggggtacaggaggaaccatagaggtagaagagaaaggaggtgagaaggaacatagtctggcagttgaccagagtgtatctggctgtatggtgtagtccccataacagggcacctatgtctgtacattgcacaaaaacaaccatccagtgtgttcttaaaagtcctgtgaaggtacattgtaatttgaactatattttgaagatatcagaggatcctatcatttagaagaatctcatgggaattactttttaaaaagaaaataatcattttagggaatagaaagtctctcaacgattggttttgaa

SEQ ID NO: 585 - DNA, 1000 bp, Homo sapiens
gtgggctgtgttagccggtgaaagttggagggaaagggaaatgggaggcagtagagcatggagttacatatgcaggcactggagtcaggctgttggagttcaaaggctagctcttctgtggatttgttatgtgactttacacgctctctcttgcctcaagttcctcttctgcaaaatgaggttaataataatacctgcataaacacatgcacagcacacagaacagaagctggaatgtgataagcacttcataagcattaattcttcttactgaaactcactagggtcactttgtgcatattatcctatttaatccttagtaactgtataggtaggtgttattatcttcattctgcaaatgagaaaactgaagtgcaaagaagtttcataattttcctcaatccacacagccactatatgatgtgataaagcttacctaagctagagtcttacctgatccatctggtgcccgggctagtgcactttctcctataacactcagcctaagctaggtagatatggcaagaccactggctgaggcaactcagatgtgatcaataggtagtagggaactgtggctgacttgggggcaggggaagcagcatgctggaaagattcatctggtatgtttatagaagagagcaggcagcaggcatggggggctgatgattcagaccagaaatggctgaggaaatggtgaggtctggcaaatgtcagaggagctgtgatagaagaatgagcagaatttatgactgatgcaaataaggtagatatgatggtacgtgacagaaactgactaagaagtctgtatgcagtgggtgcagcttagagtttcaacttgaaagtttcaaacctgggactctaagaaaatagtctgaatggtaatgagaaagttgtcactttagtatctgcttcccttgaagaaaagcacctttagaggaaccaacttggagaatagtgtcgcatcaaagtgggacacttcattatttttagtggcagc

SEQ ID NO: 586 - DNA, 1000 bp, Homo sapiens
tggttctgatgagcacaccgtcggtaacctttacttcactgtcagtccagctctgtcaatcctcctttattaaggaaggaagctgatggatctttcctttctttctttctttctttcttccctggagtaggatgttttctgtacacagttagcatgtgaacttctttttaaaaagaagtttacattttactctaattctcatccataacggagtgtggtgatttgcatttgggcagttaggaaaatcagttctgttgacttcctgttttctatttctggcctcgagcagaacttcccatttgagtgggaccaagaagagcatacaaagctgaaatgttctccagaagttgatttccaatggggataaagtaagttaatggtctgaggtgtttgtctccccttgcccccgaagcttgccctttagttgctcttgtttttaaactacagggaatgaactgagggaagcattttttttttttttttcctgcaggtcagagtcccaaagctttagtgcagggttccaaggactcaggagttcaaaacatgctgcttaggctgagctcttggccagatttggagattccaatgtcttctccctttgacagttcctaagaatattttatttggatccttttctttaggtttttctgtctaaacattttattttacctagtgtgaaggggtgagggagggcagattgtttcctttcttcctcctctccccttccccctcccctctcccttattctctgtttataatttaaaaggatgctcactttcattttctcatttgcttccttcacagcaccctgtgaagctgatattgttatccccctttgacagaaggggaaactgcagtttcagtgaatttcagtgacttagtcaagtcactcagttaacagtgctgagagtgaagccctagtgttctgcctttagatctctttttcccagtaccatactgcttttctggtggaggttgtagtatataggatgatgtcaga

SEQ ID NO: 587 - DNA, 1000 bp, Homo sapiens
ttgagaagagccagaggtgatgatgccattagcagcgtgcatttagtacttatcacaacctatttacattttctatataaacattgatctcattagactgtgatctcctagaggaacaagtcccatgtcattctcattgacaaaatgaacatggcagatacttggtaaatgtttgctagtaagtgaatggaagtcaggcgagttggcttggtgatggcagctggggtgttgatggaaataccgtgcttctttttggacatgatggaatttggggatgtggtctatttgttagatgcagtttctaggaagagattacccaaagaactgaagaacaatgacaaacttatgtgtatgtgagggcaagataaagagtagagagatggtatagttgggtatggagagaatgctgtaactgaactgctcccttcaagatgtcaggtaagattggagagaaaatgcaggatagcatttgtcacaggtagttggaatgtggagggaagactggaaggatgagaaggactgaggtggacctgtgggctgtgttagccggtgaaagttggagggaaagggaaatgggaggcagtagagcatggagttacatatgcaggcactggagtcaggctgttggagttcaaaggctagctcttctgtggatttgttatgtgactttacacgctctctcttgcctcaagttcctcttctgcaaaatgaggttaataataatacctgcataaacacatgcacagcacacagaacagaagctggaatgtgataagcacttcataagcattaattcttcttactgaaactcactagggtcactttgtgcatattatcctatttaatccttagtaactgtataggtaggtgttattatcttcattctgcaaatgagaaaactgaagtgcaaagaagtttcataattttcctcaatccacacagccactatatgatgtgataaagcttacctaagctagagtcttacctgatccatctggtg

SEQ ID NO: 588 - DNA, 1000 bp, Homo sapiens
ccgggctagtgcactttctcctataacactcagcctaagctaggtagatatggcaagaccactggctgaggcaactcagatgtgatcaataggtagtagggaactgtggctgacttgggggcaggggaagcagcatgctggaaagattcatctggtatgtttatagaagagagcaggcagcaggcatggggggctgatgattcagaccagaaatggctgaggaaatggtgaggtctggcaaatgtcagaggagctgtgatagaagaatgagcagaatttatgactgatgcaaataaggtagatatgatggtacgtgacagaaactgactaagaagtctgtatgcagtgggtgcagcttagagtttcaacttgaaagtttcaaacctgggactctaagaaaatagtctgaatggtaatgagaaagttgtcactttagtatctgcttcccttgaagaaaagcacctttagaggaaccaacttggagaatagtgtcgcatcaaagtgggacacttcattatttttagtggcagcatggttctgatgagcacaccgtcggtaacctttacttcactgtcagtccagctctgtcaatcctcctttattaaggaaggaagctgatggatctttcctttctttctttctttctttcttccctggagtaggatgttttctgtacacagttagcatgtgaacttctttttaaaaagaagtttacattttactctaattctcatccataacggagtgtggtgatttgcatttgggcagttaggaaaatcagttctgttgacttcctgttttctatttctggcctcgagcagaacttcccatttgagtgggaccaagaagagcatacaaagctgaaatgttctccagaagttgatttccaatggggataaagtaagttaatggtctgaggtgtttgtctccccttgcccccgaagcttgccctttagttgctcttgtttttaaactacagggaatgaactgagggaagcat

SEQ ID NO: 589 - DNA, 1000 bp, Homo sapiens
  misc_feature 310: n = A,T,C or G
ttcaccttcttctgccttattgttgtatctaaactgtcaataaattggatgatgctggctcacatttgtgagggcagattttctttatttagtctactgattcaaatgctaatttcccccagaaacaccctgagagacacatccagaaataatattttaccagctatctgagcatccctaagcccaaccaagttgacacataaaattaataatcactgatgatagtaatgaaaagaaaaaacttggatttctgctttttggtcttcatgagatattttcctcactgtatctctcttcatgagatattttncactatatcacatggatatattttccacttcgatatagtagaaaatatgcatggaaaaatgcatctattatttattgagcacatattatacttgaggcactctgctaggcactgtattgaacaaagatgattaagacagtgtacctttcctaaggcacagaaaccataagataaatatacaaatgactgtagtgcaaggtagaatatacaaatgcacaactaagcaaatctgagaatggggctttcacacattgtgggagaatgagagaaagcttcatggaggaggtaacttttgacctaaaccttggagcaggagcacctgagttccagaggttaattaaaaaaatgaaggcagagggagagagggcagggtgggcaaagggaaaaacaggaaatataaatgtgagtcatttttggaaaactgtgggaagtctcttttaggtgtggtgtatgaagtgtgtgtatgttgggggaatagagcaaagtaaggattaaaagtcaggtttccaggctatgttgcctggccaagctcagggctttgcacttggttcatcagcattgatatgttttttgttttgttttgtttttttgacagcgtctcgctccgtcaccagtctggagtgcagtagtgcaatctcggctcactgcaacctctgcctccgggttcaagcaattctcctgcctcagcct

SEQ ID NO: 590 - DNA, 1000 bp, Homo sapiens
ccaagtagctgggactacaggtgtgtgccaccccgcccagctaatttttgtatttttagtagaggctgggcttcaccacgttggccaggatggtctcgatctcttgaccttgtgatccgcccgcctcggcctcccaaagtgctgggattacaggcgtgagccaccgctcccggcagcacttatgggttttaaatatgagagtgacaacatcaggttattgggcagcaggaggtgggccagttttgaaaggcaggtgaatgaggcagtgagataagttgggaggggctgcaatagttcagaaacaaggtagtgtgcaagtaaatcacaggtggcaccagagatgaagaggaagaggcagtgtgacagctctgttgcatgacacaacatgggaaacgcaggattgagaagagccagaggtgatgatgccattagcagcgtgcatttagtacttatcacaacctatttacattttctatataaacattgatctcattagactgtgatctcctagaggaacaagtcccatgtcattctcattgacaaaatgaacatggcagatacttggtaaatgtttgctagtaagtgaatggaagtcaggcgagttggcttggtgatggcagctggggtgttgatggaaataccgtgcttctttttggacatgatggaatttggggatgtggtctatttgttagatgcagtttctaggaagagattacccaaagaactgaagaacaatgacaaacttatgtgtatgtgagggcaagataaagagtagagagatggtatagttgggtatggagagaatgctgtaactgaactgctcccttcaagatgtcaggtaagattggagagaaaatgcaggatagcatttgtcacaggtagttggaatgtggagggaagactggaaggatgagaaggactgaggtggacctgtgggctgtgttagccggtgaaagttggagggaaagggaaatgggaggcagtagagcatggagttaca

SEQ ID NO: 591 - DNA, 1000 bp, Homo sapiens
  misc_feature 328, 638: n = A,T,C or G
ttaaagcatcaataatggacctttgcaaaaataagcactttctaacaccaatgtgccatccatcagcaaaggaggccattagcaaagtccaattcatagactgcctctgattttgcattttaaacttgctaatatttagctcacagtgtgattttcccacggtcacacacctagttggtggtgaattgccgtaattttgcaattcatattattttgcatgtatctcattttatttgtattctgtgccaatctctctgatattgaatgtaagtttattgagtgcagatgtctgtgtttttatttttgtgtccctagtgcccaacatatngtctagggaggaaaatacttgttagataaacaattagatgatctattaggattctgtagagaaacaaaaccaataggaaatatatagatacataagaggagatatattgtggaaattggctcatgcaattatggaggttgaaaagtctcacaatatgtcatcttgaagctggagaaccaggaaagccagtggtataattcagtctgagtccaaaggtctgagaaccaggggagccaatggcataacttccagtctgatgccaaaaggcctgagaaacttcaggggagaatctgaagtcccaagaactagnaactccaatgtcagagcaggagaagatggatgtcccagctcaaggaaagagagttcaccttcttctgccttattgttgtatctaaactgtcaataaattggatgatgctggctcacatttgtgagggcagattttctttatttagtctactgattcaaatgctaatttcccccagaaacaccctgagagacacatccagaaataatattttaccagctatctgagcatccctaagcccaaccaagttgacacataaaattaataatcactgatgatagtaatgaaaagaaaaaacttggatttctgctttttggtcttcatgagatattttcctcactgtatctctcttcatgagatatttt

SEQ ID NO: 592 - DNA, 1000 bp, Homo sapiens
cactatatcacatggatatattttccacttcgatatagtagaaaatatgcatggaaaaatgcatctattatttattgagcacatattatacttgaggcactctgctaggcactgtattgaacaaagatgattaagacagtgtacctttcctaaggcacagaaaccataagataaatatacaaatgactgtagtgcaaggtagaatatacaaatgcacaactaagcaaatctgagaatggggctttcacacattgtgggagaatgagagaaagcttcatggaggaggtaacttttgacctaaaccttggagcaggagcacctgagttccagaggttaattaaaaaaatgaaggcagagggagagagggcagggtgggcaaagggaaaaacaggaaatataaatgtgagtcatttttggaaaactgtgggaagtctcttttaggtgtggtgtatgaagtgtgtgtatgttgggggaatagagcaaagtaaggattaaaagtcaggtttccaggctatgttgcctggccaagctcagggctttgcacttggttcatcagcattgatatgttttttgttttgttttgtttttttgacagcgtctcgctccgtcaccagtctggagtgcagtagtgcaatctcggctcactgcaacctctgcctccgggttcaagcaattctcctgcctcagcctgccaagtagctgggactacaggtgtgtgccaccccgcccagctaatttttgtatttttagtagaggctgggcttcaccacgttggccaggatggtctcgatctcttgaccttgtgatccgcccgcctcggcctcccaaagtgctgggattacaggcgtgagccaccgctcccggcagcacttatgggttttaaatatgagagtgacaacatcaggttattgggcagcaggaggtgggccagttttgaaaggcaggtgaatgaggcagtgagataagttgggaggggctgcaatagttcagaaacaaggta

SEQ ID NO: 593 - DNA, 1000 bp, Homo sapiens
acagggcttgtgtgatgtgacgtgaccacatgaaaggaaggggctttgtgaattgttgcggcagactgagattccttttcacagcatttgagaaataacagaaagagaatttgttattttgaaatgacttcctggcggctgagttgttttcatttgataacgacccctctctaataccaagtcatggtttgcagtttacgtcttagggttttcacagattttatttgatggtaggaaccacatcatttgttctagatttagcatgtgaaattcccagtaaattcttggtgacaatgactgattgcttcattcataaacatttattgaatacttgctgtgtgccaagcatcgtgtgtagaggatacagagatgagcaaaaataggtccctactcacatcatagaggggaggccgactcacatgcacacatttccaatcagatatggtgaatactagtggtggaaggttaggagcccagaggacagcatctcatccactgggaccttgcttcctacgaggcttgtcctgcatttcatggccttaaatttcaccaatgtagttatctagtggtgctgataaatcacttataattagttttttattgtctaagtatcaattttagctgctgtttttttaacctttctttagtttctgcctacataatttccttagaattaaagcatcaataatggacctttgcaaaaataagcactttctaacaccaatgtgccatccatcagcaaaggaggccattagcaaagtccaattcatagactgcctctgattttgcattttaaacttgctaatatttagctcacagtgtgattttcccacggtcacacacctagttggtggtgaattgccgtaattttgcaattcatattattttgcatgtatctcattttatttgtattctgtgccaatctctctgatattgaatgtaagtttattgagtgcagatgtctgtgtttttatttttgtgtccctagtgcccaacatat

SEQ ID NO: 594 - DNA, 1000 bp, Homo sapiens
  misc_feature 310, 673: n = A,T,C or G
gtctagggaggaaaatacttgttagataaacaattagatgatctattaggattctgtagagaaacaaaaccaataggaaatatatagatacataagaggagatatattgtggaaattggctcatgcaattatggaggttgaaaagtctcacaatatgtcatcttgaagctggagaaccaggaaagccagtggtataattcagtctgagtccaaaggtctgagaaccaggggagccaatggcataacttccagtctgatgccaaaaggcctgagaaacttcaggggagaatctgaagtcccaagaactagnaactccaatgtcagagcaggagaagatggatgtcccagctcaaggaaagagagttcaccttcttctgccttattgttgtatctaaactgtcaataaattggatgatgctggctcacatttgtgagggcagattttctttatttagtctactgattcaaatgctaatttcccccagaaacaccctgagagacacatccagaaataatattttaccagctatctgagcatccctaagcccaaccaagttgacacataaaattaataatcactgatgatagtaatgaaaagaaaaaacttggatttctgctttttggtcttcatgagatattttcctcactgtatctctcttcatgagatattttncactatatcacatggatatattttccacttcgatatagtagaaaatatgcatggaaaaatgcatctattatttattgagcacatattatacttgaggcactctgctaggcactgtattgaacaaagatgattaagacagtgtacctttcctaaggcacagaaaccataagataaatatacaaatgactgtagtgcaaggtagaatatacaaatgcacaactaagcaaatctgagaatggggctttcacacattgtgggagaatgagagaaagcttcatggaggaggtaacttttgacctaaaccttggagcaggagcacctgagttc

SEQ ID NO: 595 - DNA, 1000 bp, Homo sapiens
ctcctttcctattgtcctgacttgcatgacactggcaagctacaaaatgggaacaatagcaactgccttagaaggctgacaggattcacgggaagcaccctgagcagagtctaattcctaatgagtggtccttacatattaggatcattttctttccttttgagcttctggtttcttggcctctggccttagcctctttcaacatattctacataggtaatcagattcaccttcaaacaatgctgttttgatcttgtcatctggtgaagaaaaaataaaaccttcagtggctttctaagacgatgaaatcaaattcaaagtctcatcgtggtattcaaggtcttctgtaatctcccctcagcctgtggctcttactgatgccccattcttctattgctcagggtgctttgggctgtagccactaggttgacgagcatcctcttgacgagcatcctgatgatgctgataaaagtgctcaaggacattttgggaattttttctttagtgttatctaggatagtactgtatacaatgcatatttttatgtataaatcttatttctgtctatgttagttgccttgaaacaaaaactgggcctttgtatctgtgcaggctacaaaggcttgacactgctacccttagaaaggcctgcttgccaggttagcctttggttggtaactgggaactgagcccttggagggctctcagtcaacagtcaattgataagtgtggttcactgtgcctagacttttgtgcaaacaacacagtttatgcttgaacacctgctcccctgtttggagtctggaatattttgatgtgctaggcagagggtgcctatgtgatcagctccatgaaaaaccttgggcaccgagtttctaaaaagaagcttctgtgggctgaaacgtcatatacaagttgctacattttccttgctgtactctatgtgatctcccgtggtaggcagaagcataaggaaatctgcacgtaaaatcattcagac

SEQ ID NO: 596 - DNA, 1000 bp, Homo sapiens
ctgcctgtggctctcccttatgatctggctgtgtatccttattacatcactagaataaatcttagctttaagtactgccatacactgagtcccatgggtccttctagtgatgtccaaatgtagggggcaggggtcttgggtacccctgacacagtatctctttcaaaacaaattcttagagtaggttcttaataaatattttgtgattgagcatctcaaatctcccaaacattgtagatgcttaaaacatttaaacacttttgtttctttttaccatttttgattttttgggcacctttaagtttttttttatatgccatcaggccaacatttataacatatggtagatctgagatgttgttttactgcctacaaagaattgttctagttttgcctatttattttcttttacttcccgatatttcagacactgttagatcttgccagagcagttcttttgggcttttgtgatacagaatcactggaaaaggtagagggttagaagggcacaggtttgaggactaggtctgggagatcagttttggtgggagggtatgaaggagagaggcgcatgacagggcttgtgtgatgtgacgtgaccacatgaaaggaaggggctttgtgaattgttgcggcagactgagattccttttcacagcatttgagaaataacagaaagagaatttgttattttgaaatgacttcctggcggctgagttgttttcatttgataacgacccctctctaataccaagtcatggtttgcagtttacgtcttagggttttcacagattttatttgatggtaggaaccacatcatttgttctagatttagcatgtgaaattcccagtaaattcttggtgacaatgactgattgcttcattcataaacatttattgaatacttgctgtgtgccaagcatcgtgtgtagaggatacagagatgagcaaaaataggtccctactcacatcatagaggggaggccgactcacatgcaca

SEQ ID NO: 597 - DNA, 1000 bp, Homo sapiens
agctgctggcccaggtgctaaacccctcacttcctgggccttgtgggcagagcctgctgagcccacgcccacccagaactcatgcccagcccagaactcgggcccacccagaacaagcgccgtgcccagccctggttcccgccagcgcctctccctccacacctccctgcaagctgagggagctggctccgaccttggccagcccagaaaggggctcccacagtgcagtggcgggctgaagggctcctcaagcacggccagagtgggcgccaaggccgaggaggcaccgagagtgagcgagggctgcaagggctgccagcacgctgtcacctctcaatacgatctgtgaacatgtgccctttctcagttcagaaagccatttagagcaaatgtacttatttactttatccaggctctgcttactcctctcctctccacagccatctcctccattagaaatgcttttccctgccatttttgacagaccctgagcctcctggcctccctgcctgagacgcattatagtctctctgacctggaccactgcatgcagcttgggagcctccctgtctttaaggtatcggacaaaatatagatgagagtagcaaggcattaggagtagtagtaatagcagtacaaacaagaataataatttttatgataatagtagctaacatttgttgaactccttttatgtgccaagcattttatgtttattatcttaccacccttgacaaggaccttatgaggtgggtactatcaacccagtttctcagaaggggaaactgaggcttataaagaatatacaacttgctccaagtggtaactagtggagagaggatttaaaccttggctcttcaacatcccataacctatgcatttagttgctgttcataaatagtcacctgcatatgttcatcttgcttttacctgtgttcatcccatcttttttgtgaaactcctggaaggcaggtcgtgtcttctttcattcttttatacc

SEQ ID NO: 598 - DNA, 1000 bp, Homo sapiens
tctcagagggctgtaacaatacatgctcagaaaacatttctgttcaacctgcatgaagtacaaggcaggctgaaatgtaaagaaatacataaattacactgaggaagagcaaatcctttcatataactttttcctggcattacctcttaggggaaaagaattctcaagcaagctgtaactgagctggttaccaaaatcagaatgaattctccccaatcacgggggacattccataagcctttggagtgaggtctattttaaggattttgttcaagttcctccttcttgtttcctggccacactgcccagcacttcaattggctaatagggattctgaataagaaagatacaggcagctcacttggaagttacgttaaggactaataaagatcttggagtgattttcaacaagataagatcagcatcctggtattgagttattttgctacattaattaatttcagtttgttctaatggtctttggcctcctgcttaaatgtcaattgaggcaacagattaattccccttaaatagtggcctgtcatgtcttgttacttagttctgggttttataaagtaagaactaagatggatatttatcaatcgagcagatttctgtgttgtgtcctctaaagcccttggggtcagtgtctcactgtagcatcactaacaccttttatggaatcaagtgattaataaatgtgtcctcatgagactgtgatgcttctgggtgttcattttagataccttaataattagtctcaagagtagctcagttattaagtgattttggggttgcatcatgtcagggaaacaatcaagaagaaactattttaatagcataaatttctctgagatagtgaagataaaagaatgctaccagtttacccactccttactgtctgagtcaggaagaaggtggaacatcctattccttcttcacctctattacctcatttagaaaattttgactatttcttcttttagctccctttttacgg

SEQ ID NO: 599 - DNA, 1000 bp, Homo sapiens
ctgctatggggtgtatcagagtcagggtgaaagggtcttaaggtatttgaaaataaagcagcagataagcttgacatggagagtagcctacctctggctctgttttctccatttccttaggagtgaaaagctggccgtcagcaagcagattcagtgctcacattgtagccacataatcaaaggaagaaatacatatctttttttttttgagatggagtctcacactgtcacccaggctggagtgcaatggcacaatctcggcttattgcaagctccgcctcctgggttcatgctattctcctgcctcagcctcccgagtagccaggactacaggcgcctgcccccactccgggctaattttttttttttttttttgtatttttactagaggcggggtttcaccgtgttagccaggatggtctcaatctcctgacctcgtgatctgcccgcctcagcctcccaaagtgctgggattacaggcgtgagccaccatgcctggctgaaatacgtatcttttaagatctaaagaaaatcgttttaaagttactgttgtgtccatcttgttttcttgttactgaacttatttcaaaaatttaaataacattaaaggaaggtataagatttttatggctatccaaaagctgcattaaaaaaaaagtaacttaaggatttccaagtcaatttccggctgtgaaaatcacactgtgtcctgagttggtgggttcttggtcttactgatttcaagaatgaagccgcagaccctctcagtgaatgttacagttcttaaagccagcgtgtctggagtttgttccttctgatgtttggatgtgttcggagtttctttcttctggtgggttcacggtctcgctggctcaggaatgaagctgcaaaccttcgcagtgagtgttacagctcttaaggccacatgtcgggagttgttcgttcctcccggcgggttcgcggttttgctagcttcaggggtgaagctgcagaccttcat

SEQ ID NO: 600 - DNA, 1000 bp, Homo sapiens
gtgagtgttacagctcataaaggcagtgtggacccaaagagtgagcaacaacaagatttattgcaaagagtgaaagaacaaagctaccacagcatgaaagggaacctcagcaggttcccactgctggcttgggcagcctgcttttattctcttatctggccccacccacgtcctgctgattggtccattttaaagagagccgattggtctgttttacagagagctgattggtctgttttgacagggtgctgattggtgcgtttacaatccccgagctagacacaaaagttctctacctccccaccagattagctagataacagcatccattggtgtatttacaaaccctgagctagacacagagtgctgattggtatgtttacaaaccttgagctagatacagagtgctgattggtgtatttacaatcccttagctagacataaagattctccaagtacccaccagactcaggagcccagctggcttcacccagtggatcccgcacgggggccgcaggtggagctgcctgccagtcctgcgctgtgtgcccgcacacctcagcctttgggcggtcgatgggactgggcgccatgtagcagggagtggcgctcctcgtggaggctccggcgcgcaggagcccatggcaggggcgggcgggcgggggtgggaggaggggaggctcaggcatggcaggctgcaggtcccgagccctgccctgcggggaggcagctaaggcctggtgagaaattgagcacagcagctgctggcccaggtgctaaacccctcacttcctgggccttgtgggcagagcctgctgagcccacgcccacccagaactcatgcccagcccagaactcgggcccacccagaacaagcgccgtgcccagccctggttcccgccagcgcctctccctccacacctccctgcaagctgagggagctggctccgaccttggccagcccagaaaggggctcccacagtgcagtggcgggctgaag

SEQ ID NO: 601 - DNA, 1000 bp, Homo sapiens
gagagcatggtgccaccatctggtgagggtccttcatagtgaaagggtggaaggtggaagtgaacactagaaacagagagcaaatggaggctgaacttatccttttatcaggaacccactcatggggctctgccctcgtgatctaatcacctcttaaagggcccacctcccaataccattacattagcaattaaatttccacatgagttttgaagggggcattcaaatcatatcaagaaaaaaaaaagtcaagtcccctaggcttctcttctaggtagattcctgcttcagtcccttcctatatagaaactctggagtttcccctacctcatactattgcctgttttccatggctccaagagaaaaggaatattctcttttcttctgaaaaagcactacagtttattggtcagcaccaagtgtgtttaacttcagtttcagatggcaactcacacatagatgtgtttatgttgccctttatcagtattatcattggcaaagcctttggtaagcaacagaagtggctaaacagaataattccaggcttgaagttcctttttcatctggttccctctgggaaaaggctatgaaagctaagggtggtggccaagtcccaaaggccaaggtcaccatcaaacattttctgagaatctaccaaaaacacaggtctgtattaggtcaatatgcacacagttgtgctgggaaggaatgaagctttcaaatatgagaactgtacctgaaaaatctttgccatcagttctttgaaatgaaactctaagctgggaagaactctctgcttaggggaagtaggactaaaacttgacttttgatttggagaacattcaaaagactctaagctcatgagtgctcaacttgtaattttttgcccttgaaaaaactataggcgggtgcagttacacctgtaatcccagcactttgggaggccaaggtgggtggatcacttgagcccaggaattcaagatcagcctgggcaacatgg

SEQ ID NO: 602 - DNA, 1000 bp, Homo sapiens
gaaaccccgtctccactaaaaatacaaaaattagccaggtgtggtgatgcattcctgcatgccagctactcgggaggctcaggtgaggggattgattgaggctgggagattgaggctacagtgatccgtgatggcaccactgtactccaacctggacaacacaaagaccctatctcagaaacaacaacaacaacaaagaagcaacaaaagggaatttgtacttttagccatagagccttcaagtttgttataaccactggggagaaaacccttcatttctacttcattcctaaaatgggttaatcactgattatacatagaaaatttactcaaatgaaaacaaaccaccaccagattttacctttaaatatattttcttggtattattttaggttctggtagcaaaaggtgcagagataaggacatgggttaatgacatgggttatttattgcactctgcatacagcagcaagaatgcttttcctaaaaattctttttgctgaagtcccttttttgcttatgtctcttttcctaaaaaatctttttgcttaagtccctttgttgctgcccacatcatttgatttcccacagcaaattattataagcctgcattatcctgtttctcctcctcctctgaatcttcctctccatcagcacgatttctgttttctttctttgccaactagctgtgtggctaagagtaagtcactggagtctcactgtccctttgtctgtaaaactatggttttggaataagaagggtcctggcctgctatggggtgtatcagagtcagggtgaaagggtcttaaggtatttgaaaataaagcagcagataagcttgacatggagagtagcctacctctggctctgttttctccatttccttaggagtgaaaagctggccgtcagcaagcagattcagtgctcacattgtagccacataatcaaaggaagaaatacatatctttttttttttgagatggagtctcacactgtcac

SEQ ID NO: 603 - DNA, 1000 bp, Homo sapiens
gagatattactcagtaaaactctttagaaataaaataagacttgaatctacaaatggaaagggcatactgtagctcagaaaaaattgatacagaatgatcaacattgagaggtatccaagtaaacatactggccctcaaggccaatgaaaaattttagaatccaggcaaaaataaaaaataagagtgaaaaattaagttggcatgataacaaaatagactatgtagtggaatatcaaaagtaagagaaaggaatcctaacataaatgagagtacaacatttcaacatattaccataaaaagtttaaattgtctaattcacctattgactcaaatttacaaaaaagggaaatcaaattatttgtaatatgtgagatgcatctaaaacaacgaaactcagaaaggataataaagataaaaattaggcaaagacatgcaaagcaaatgcaaaaaaaaaaaagagcagctgtcataactatggttgcattcaaaacaaaaaacatgaaataagacaaaaggggaacttgataataataaaggatgtaactcacaatgcagttcaatatgataaataaattggcatggaaaacatggtgtcaaagctacagaaaataggaataggcagaaatcctttagcagtagaaaactttaacgcttatcttttaactatggagaaatcatatggaaaaaaagcaaggatagttttaatagctttacaacaaactatatactatgaagacagattacactttcctttcaagtattaatggagcagttacaaaaattaactacatatgaagccacaaagaaaactgcaatgcagtcgatcacatagaaatagtacagacattatgtcatgccaacgcaaaacttcaaatgttaaagagagaaaaaaaaataactttacctcctggaaattaaagaacactctctatataatttttcagtctcatagagaaagtcatcgctaaaaatgcagaatatttggaaagcaacacgaat

SEQ ID NO: 604 - DNA, 1000 bp, Homo sapiens
aaaacactatattagagactatgagatcttgttacagcagtacttagaggaaagttcataactttaaatacttgtaacaaataagaattaaatgaattaagcatccaatatcagaatgtattaagtaaaataaagacaaggcagaatagaaattagtaaagataaaaacagaaattaattaatttggaaaatttaaaaaatgccaaaataaagtctatgagttgtgtttgaaaaatttttaagtaaaaatgtgtgctatgctctttttttgaaatgataactttttaattgtggttaaaaatataaacctaaatttgctattttagctatttaaaaatatacaaatcaatggcattaattatatgcaaatgttgtacaatcatcaccagtactgatttctgaactttttcatcaccccagcaactctgtgtcctctaagcagtaactccccattctccctaccccctagcccctggtaaccttcagtctacattttgtgtctatgaagcctattctagatgtttcatataagtggaataatataatatttgtcattttttgtttggcttatttcacttagcatgtatcagaacttcattcctttttatgtatgaataatattctgttgtacataacataccacattctgtttatacaattgattttgttatgtgctcttggatggttctaccttttagctattgtgaataatggtgcaacacccatcttttttttaaagggaaaaagcagaaatagatgatataagaaaacaagaattgagaaataattatagatagagaaaattaaaggagattataggacttatatgtaccataagcaaataaatgtaaaaacctggataaaatatgtaatttctagaaacgataaagttctaaggctggccccagaagagttcgaaaatctaaagagaccaattacaatagaaaaaacaggaaagtcaggctatccgtcttccaaactaccaggcacagatattttt

SEQ ID NO: 605 - DNA, 1000 bp, Homo sapiens
  misc_feature 219: n = A,T,C or G
caatgcctgttggctggagagaggtaaaaattcaaacaacccgcacatatagtcttgtcatcatgagtttgtccctgaaccagggagaattcttgctagcctggaactgctcatccccttctcaacaagaccctggatcacttccaacatcaggaagaacacacttcatttaaagatgagtaacaaaaaggcaactagcacaggatctatacaaataanttacaagacaaaaggaggaagaggacaggggaacataaagaatcctcaccaataacaagttgccattaagtagaaaattatgacaaaataaatgtctatgaacaatgaatttaatgaaacaatgaagaggctggaagcagagcaattgagagatcaggggaaatactagcaccaccacaggaggaaatgaaacaagaacttctgaaggtcaggaaggaagcagaagagaaaaataaagctaccatggaaatgcaagcatactgtaataaacactaagaagaaacactgctgacatcacagtgaggaataggagggcaacattaagacacataaacaaaagatataagcaaaataaccagaaatgaacaaagttagagtgaactagagagaacatgaaagatacagaaaacaaaagaattgcaacatatgcattatttgtatcttttaagaagaagtctggagatattactcagtaaaactctttagaaataaaataagacttgaatctacaaatggaaagggcatactgtagctcagaaaaaattgatacagaatgatcaacattgagaggtatccaagtaaacatactggccctcaaggccaatgaaaaattttagaatccaggcaaaaataaaaaataagagtgaaaaattaagttggcatgataacaaaatagactatgtagtggaatatcaaaagtaagagaaaggaatcctaacataaatgagagtacaacatttcaacatattaccataaaaagtttaaattgtctaattcacct

SEQ ID NO: 606 - DNA, 1000 bp, Homo sapiens
ttgactcaaatttacaaaaaagggaaatcaaattatttgtaatatgtgagatgcatctaaaacaacgaaactcagaaaggataataaagataaaaattaggcaaagacatgcaaagcaaatgcaaaaaaaaaaaagagcagctgtcataactatggttgcattcaaaacaaaaaacatgaaataagacaaaaggggaacttgataataataaaggatgtaactcacaatgcagttcaatatgataaataaattggcatggaaaacatggtgtcaaagctacagaaaataggaataggcagaaatcctttagcagtagaaaactttaacgcttatcttttaactatggagaaatcatatggaaaaaaagcaaggatagttttaatagctttacaacaaactatatactatgaagacagattacactttcctttcaagtattaatggagcagttacaaaaattaactacatatgaagccacaaagaaaactgcaatgcagtcgatcacatagaaatagtacagacattatgtcatgccaacgcaaaacttcaaatgttaaagagagaaaaaaaaataactttacctcctggaaattaaagaacactctctatataatttttcagtctcatagagaaagtcatcgctaaaaatgcagaatatttggaaagcaacacgaattaaaacactatattagagactatgagatcttgttacagcagtacttagaggaaagttcataactttaaatacttgtaacaaataagaattaaatgaattaagcatccaatatcagaatgtattaagtaaaataaagacaaggcagaatagaaattagtaaagataaaaacagaaattaattaatttggaaaatttaaaaaatgccaaaataaagtctatgagttgtgtttgaaaaatttttaagtaaaaatgtgtgctatgctctttttttgaaatgataactttttaattgtggttaaaaatataaacctaaatttgctatt

SEQ ID NO: 607 - DNA, 1000 bp, Homo sapiens
  misc_feature 667: n = A,T,C or G
agacaaaagatatgtcttctacccttctccttagaatttgccagaaaacagggacagaaatatgaatttcatatttgataaaccttgaagactaactcccaaaagataatatttggagaggctctcaatgcagtgaagatcaaatatgggtgcacaaaggctcctggagggagtgcttgggaacacaggtctcagataaagctggcaggaaactgttttcttaagtagatggcactttgagggcaaaaccaaccaccccttcttcggaatcacaggaaaggcaggtacatggagggtagggttggagcatccctttaccgcatttgacctcacaggaaagtggagcaagcagaactgcagaaaatgtgcagaaatgctgcaatcagtctgtgtcctagtgaggcagggtggaggagagaggctgaattgcctcctgctctgtagctgccaatgcctgttggctggagagaggtaaaaattcaaacaacccgcacatatagtcttgtcatcatgagtttgtccctgaaccagggagaattcttgctagcctggaactgctcatccccttctcaacaagaccctggatcacttccaacatcaggaagaacacacttcatttaaagatgagtaacaaaaaggcaactagcacaggatctatacaaataanttacaagacaaaaggaggaagaggacaggggaacataaagaatcctcaccaataacaagttgccattaagtagaaaattatgacaaaataaatgtctatgaacaatgaatttaatgaaacaatgaagaggctggaagcagagcaattgagagatcaggggaaatactagcaccaccacaggaggaaatgaaacaagaacttctgaaggtcaggaaggaagcagaagagaaaaataaagctaccatggaaatgcaagcatactgtaataaacactaagaagaaacactgctgacatcacagtgaggaataggagggcaacattaagacacataa

SEQ ID NO: 608 - DNA, 1000 bp, Homo sapiens
caaaagatataagcaaaataaccagaaatgaacaaagttagagtgaactagagagaacatgaaagatacagaaaacaaaagaattgcaacatatgcattatttgtatcttttaagaagaagtctggagatattactcagtaaaactctttagaaataaaataagacttgaatctacaaatggaaagggcatactgtagctcagaaaaaattgatacagaatgatcaacattgagaggtatccaagtaaacatactggccctcaaggccaatgaaaaattttagaatccaggcaaaaataaaaaataagagtgaaaaattaagttggcatgataacaaaatagactatgtagtggaatatcaaaagtaagagaaaggaatcctaacataaatgagagtacaacatttcaacatattaccataaaaagtttaaattgtctaattcacctattgactcaaatttacaaaaaagggaaatcaaattatttgtaatatgtgagatgcatctaaaacaacgaaactcagaaaggataataaagataaaaattaggcaaagacatgcaaagcaaatgcaaaaaaaaaaaagagcagctgtcataactatggttgcattcaaaacaaaaaacatgaaataagacaaaaggggaacttgataataataaaggatgtaactcacaatgcagttcaatatgataaataaattggcatggaaaacatggtgtcaaagctacagaaaataggaataggcagaaatcctttagcagtagaaaactttaacgcttatcttttaactatggagaaatcatatggaaaaaaagcaaggatagttttaatagctttacaacaaactatatactatgaagacagattacactttcctttcaagtattaatggagcagttacaaaaattaactacatatgaagccacaaagaaaactgcaatgcagtcgatcacatagaaatagtacagacattatgtcatgccaacgcaaaacttcaaa

SEQ ID NO: 609 - DNA, 1000 bp, Homo sapiens
gaacctgatgtgattgatcagtgaagcaaattggtgcttgaactgagatccacagtggtgcttcccaaattttatgtgcatatgaatatctggggatcttgttaaatgcagattcctgtgctgcttctggggcttggggaggagcctaaaattctgcatctctaataagctgccatgtgatgctgatgctgctggtaccaaagattctaaaggacaaacataacggaaagcaggggttgggggaaataagtttcacagggagggaacagttatacacagcaagaacatagtctgcatggtgctcttctggtccctaaccactgaagcaaaggtcaagtaattgttctaccttcttccatgactaattggcaggatatatgttcccctgataggacatttcccaactttaaggctgctctttatgtttacttcaaaattccttttacctcttgtaaatattgggatttccatttaaaaggtcagacaaaagatatgtcttctacccttctccttagaatttgccagaaaacagggacagaaatatgaatttcatatttgataaaccttgaagactaactcccaaaagataatatttggagaggctctcaatgcagtgaagatcaaatatgggtgcacaaaggctcctggagggagtgcttgggaacacaggtctcagataaagctggcaggaaactgttttcttaagtagatggcactttgagggcaaaaccaaccaccccttcttcggaatcacaggaaaggcaggtacatggagggtagggttggagcatccctttaccgcatttgacctcacaggaaagtggagcaagcagaactgcagaaaatgtgcagaaatgctgcaatcagtctgtgtcctagtgaggcagggtggaggagagaggctgaattgcctcctgctctgtagctgccaatgcctgttggctggagagaggtaaaaattcaaacaacccgcacatatagtcttgtcatcatgagtttg

SEQ ID NO: 610 - DNA, 1000 bp, Homo sapiens
  misc_feature 147: n = A,T,C or G
ccctgaaccagggagaattcttgctagcctggaactgctcatccccttctcaacaagaccctggatcacttccaacatcaggaagaacacacttcatttaaagatgagtaacaaaaaggcaactagcacaggatctatacaaataanttacaagacaaaaggaggaagaggacaggggaacataaagaatcctcaccaataacaagttgccattaagtagaaaattatgacaaaataaatgtctatgaacaatgaatttaatgaaacaatgaagaggctggaagcagagcaattgagagatcaggggaaatactagcaccaccacaggaggaaatgaaacaagaacttctgaaggtcaggaaggaagcagaagagaaaaataaagctaccatggaaatgcaagcatactgtaataaacactaagaagaaacactgctgacatcacagtgaggaataggagggcaacattaagacacataaacaaaagatataagcaaaataaccagaaatgaacaaagttagagtgaactagagagaacatgaaagatacagaaaacaaaagaattgcaacatatgcattatttgtatcttttaagaagaagtctggagatattactcagtaaaactctttagaaataaaataagacttgaatctacaaatggaaagggcatactgtagctcagaaaaaattgatacagaatgatcaacattgagaggtatccaagtaaacatactggccctcaaggccaatgaaaaattttagaatccaggcaaaaataaaaaataagagtgaaaaattaagttggcatgataacaaaatagactatgtagtggaatatcaaaagtaagagaaaggaatcctaacataaatgagagtacaacatttcaacatattaccataaaaagtttaaattgtctaattcacctattgactcaaatttacaaaaaagggaaatcaaattatttgtaatatgtgagatgcatctaaaacaacgaaac

SEQ ID NO: 611 - DNA, 1000 bp, Homo sapiens
  misc_feature 843, 886: n = A,T,C or G
ctttgaaagaaaagaaaaataagtgaaaatgcttcacagaatattttatagcaacacacttctctggattaattaatagttttagaagatggaggtaaagagctcatctgtataaaggtctgaagatgcacatatcatcttggaaaaaaagaggctgttattccatcatttccacatacacggttttgttacaaatataattgaaaattcaagtctttcaaaaatagaatacatgggtactggagattaggtcacacataatcaaattctaaatttcttttccagcaaagtcgtccctactgaggtcagagtacaaagaagaggggatggtaggctaaacgccaaatgaatgaaaagggaagatttttcaggcagggagtcattagtcttgtcacatgctgctgatatgaaaggactgaccactggattgagcaacatgaaggcatgtgacctcaatacaagctttttctgtggttggaatgagataaaagagaacagggagagaagtggagtcaccaagtgaggacaactctttgaaggaggtttgtggaccatttgttgttatacagagggaaatgcacaggggattttatgatgagggaacagctctgtttaagaactgggtgtaattgcttttgagtccacagagagtcaaggttctctgtgatttaattattcaggaaagaggcttcctagaaagtttacactttcttcaaagaaagtcagtttctctcatttgcatgtctctcatttctaagtgacttaatgaaaattcctttccccactaacttgagttttatataccttgtatggagtagacataagaagtgctggttggcctgntttggtgcaggacaggatcccacaaaaagaaatttcagccttntaacctttcttcctttgactttctgtgattagtttccttagtgtctggtaacagctctggttcctttgctgtagtgtggtgagcctcatctcttcaaacaaattggttcacagg

SEQ ID NO: 612 - DNA, 1000 bp, Homo sapiens
tgggggatggtgggcgggagggatgaaatcattgttttgcttcaatgtcggttctcccctgagaggtctttcacagcaagggagtctgtatttttagaattagcatgttctgtttcaatgttgtgaacattcattttaaacctactatatttagcagaggtttaattacccaaattgggaaactagttttaaaccgtcaccttctacttggttaatcaaaacagtccctaccaccagcaggggagactggcaatttcagtcatacagccacacctggtgagggcaactgacaaaagcaattccattgcctgagttcagcatcttcagcacccatccagccctgttgtagcccctctttctttcagtaagactttcctgcaatataccctctgtggactagggctggggggatgtgtctgctctgatgtctgtggggagtgtcttttcttcccacacaaaaatcgtgattatattttccaaaatagcactcaggaaacaatctctctgtggcatttacagatatgtgagatgttgaggaactgcggtctgaatgatgaaatttcttggatttttcagcaatgtcattttttccttcatttactcactcacttctggaagggccagtctgagagctgggctgaggagtccaaggctgatgcagtcatggatgagtctgaggcagggagaccactagcaggagaatgggcagtgccaactggctttaaaaatactcagatacaaatatgaattttgcacatccatttagtcatttggcaaatatttattgattggttgtgggataagccatagagcctgacactagtttagtgagagagatacacaggaataggaaaaaaattatcataataaatgcacagctacagagcgagagctctgaaggatcattttatgagtatgcgtaacaggaacctgatgtgattgatcagtgaagcaaattggtgcttgaactgagatccacagtggtgcttcccaaatttta

SEQ ID NO: 613 - DNA, 1000 bp, Homo sapiens
gtgggtggtgttgtactatggtgtggagagaggagaatgtctcaggagaccaggtaagggttcctatgattgcagaaccaaccaaagagccttggaggcaccaatgatgatgattttctctagttcttcaaaagccaggaactgggccatattgttttctttgaaagaaaagaaaaataagtgaaaatgcttcacagaatattttatagcaacacacttctctggattaattaatagttttagaagatggaggtaaagagctcatctgtataaaggtctgaagatgcacatatcatcttggaaaaaaagaggctgttattccatcatttccacatacacggttttgttacaaatataattgaaaattcaagtctttcaaaaatagaatacatgggtactggagattaggtcacacataatcaaattctaaatttcttttccagcaaagtcgtccctactgaggtcagagtacaaagaagaggggatggtaggctaaacgccaaatgaatgaaaagggaagatttttcaggcagggagtcattagtcttgtcacatgctgctgatatgaaaggactgaccactggattgagcaacatgaaggcatgtgacctcaatacaagctttttctgtggttggaatgagataaaagagaacagggagagaagtggagtcaccaagtgaggacaactctttgaaggaggtttgtggaccatttgttgttatacagagggaaatgcacaggggattttatgatgagggaacagctctgtttaagaactgggtgtaattgcttttgagtccacagagagtcaaggttctctgtgatttaattattcaggaaagaggcttcctagaaagtttacactttcttcaaagaaagtcagtttctctcatttgcatgtctctcatttctaagtgacttaatgaaaattcctttccccactaacttgagttttatataccttgtatggagtagacataagaagtgctggttggcctg

SEQ ID NO: 614 - DNA, 1000 bp, Homo sapiens
  misc_feature 43: n = A,T,C or G
tttggtgcaggacaggatcccacaaaaagaaatttcagccttntaacctttcttcctttgactttctgtgattagtttccttagtgtctggtaacagctctggttcctttgctgtagtgtggtgagcctcatctcttcaaacaaattggttcacaggctgggggatggtgggcgggagggatgaaatcattgttttgcttcaatgtcggttctcccctgagaggtctttcacagcaagggagtctgtatttttagaattagcatgttctgtttcaatgttgtgaacattcattttaaacctactatatttagcagaggtttaattacccaaattgggaaactagttttaaaccgtcaccttctacttggttaatcaaaacagtccctaccaccagcaggggagactggcaatttcagtcatacagccacacctggtgagggcaactgacaaaagcaattccattgcctgagttcagcatcttcagcacccatccagccctgttgtagcccctctttctttcagtaagactttcctgcaatataccctctgtggactagggctggggggatgtgtctgctctgatgtctgtggggagtgtcttttcttcccacacaaaaatcgtgattatattttccaaaatagcactcaggaaacaatctctctgtggcatttacagatatgtgagatgttgaggaactgcggtctgaatgatgaaatttcttggatttttcagcaatgtcattttttccttcatttactcactcacttctggaagggccagtctgagagctgggctgaggagtccaaggctgatgcagtcatggatgagtctgaggcagggagaccactagcaggagaatgggcagtgccaactggctttaaaaatactcagatacaaatatgaattttgcacatccatttagtcatttggcaaatatttattgattggttgtgggataagccatagagcctgacactagtttagtgagagagatacac

SEQ ID NO: 615 - DNA, 1000 bp, Homo sapiens
  misc_feature 126: n = A,T,C or G
ctacaaaaggggtaaattgtatgctaaataacacagaaatagcaaacatagggaagagctgctacttctaggactgagggaggatacccaagaaaagaacaaacatggaagggtctttcacacctnaaggctgagattcagaccttgttggagagggtggtgctgtggcccgcaggatagaaaagttctttgaggtgccacaggccaggcctggtgagtagggtactggctgttgggtgccagtggatcagcactgtggtcaaaaaagtgccttctagggtgctggaaaaacccactggaaggtggtcaccattgggtctcctgcatactgctggcaaggaaattgcctgctcgggtgacaataaaactcagtaggaagccctcactaggtgctggtggaactcactgtagggtgactctcccatacaccactggtggcggccacaggtaacaagaaccaggaagaatcaagaaggaatgctcctttatttgctataccttgttttattttattttatttatttatttttttgagacagagttttgccttttttccctggctggagtgcaatgatgcgatcttggctcactgcaacctccacctcccaggttcaagtgattctcctgcctcagcctcccgagtagctgggattacaggtgcgtgctaattttgtattttcagtagagatggggttttaccatgttgtccaggctggtctcaaactcctggcctcaggtgatcctcctgcctctgcctcccaaagggctgtgattacaggcatgagacaccgcatctgacccctttactataccttgtagtgtctcccctacactctaccagcaacagatgacattgcactggctgaccgaggagccagattagtatcgtggaacagggcaaagaagggtggatttggagcggagaggcaatatattgataactgtcttggtgaactcctttggcttcttagcttccacatgcaccattttatatatatat

SEQ ID NO: 616 - DNA, 1000 bp, Homo sapiens
tgaactctgtataacacaaagtcaactctgttcttcagagaaatgcagagttctcacccctttccccaaatgaggagacacacagttccaacagttatcgtagtctcatctggctgtcttaaatactcctcaaatcaaagtcccactgaatattctcttacctaaaggctaaattgtagagtttatattcaacaactttcataaaataatgaagagagaaaaaggaaaatggttaatatatacaaatacacacatatacatcacatgcaaagaggaaatacacaaaactgtcagaattctcagttttgtaattgattgagaggccatagttggtatctatggcttccttcttctactgcctattctgtatttccattgcccttaaatggtcaaggttctttatctggggagtgatccaaactttcatttctcaacagcctgaatcctcaataatcctgccccctccttttgactcctgcggtttcccattaacctttatttcacaccttgagtccaggttccagggagttagctaatattggagatgacgcatctggtcgtaggcaggtgtctggtgagatggctgtttttccctttggtcctggtccttggacctcatacattgctgttgagccattgcttgtttctgtctacatggcatatttacctcaggaggctctttccactatcttcatgtgatacttgagggagctgcatcatcacagtttcttgcttctccaaaacgctggggtggagggggaagggcagtggggtgggggaagagggatccagaatccctgcacggactcctctggctggatgccagatgcagccactctcttccccatctctgtgctccttttctgggtggtggtagggtgaggtgggaaattactttcttgttggtcttggatactttgcaaagacatcagtacattttgttagctttaaaggtttagttcttagcactttgccatcctgggaaatcaatgccagcaaa

SEQ ID NO: 617 - DNA, 1000 bp, Homo sapiens
tatccctgagacttttttgaagttataaatgaggttgctttcttggtttctttttcagatagttggttattggtgtataaaaacacaaccgattttttatattgattttgtgtcttgtaacattactgaatttgtaaaatcatgtcatctgaagtagagacaatttggcttcttccttttttttttttttgaattggaatctctctctgtcatccaggctggagtgctctggtgtgatcttgactcactgcatcctctatttcccaggctcaagtgatcctcccacctcagcctcctgagtagttgggactacaggtgtgtgccaccacacctggctaatttttgtatttttcatagagacagggtttcatcatgttgtctagtctggatttgaactcctgggttcaagcaatctgcccacctcagcctcccgaagtgctgggattacaggcttgagccaccacaactggctggcatcctgttttccagtttggatgcctttcatttctttctctttccggaaagagaaagtctggctaggacttccagtataatgccgaataagagtgcttagagtaggtgtccttgtcttattctagttcttagaggaaaggctttcagttattccccattcagtatgatgttagctgtgggctcgtcatatatggcctttattatgtcaaggtatgttcctgctatacctaatttgttgagagtgttcatcatgaagggcagggtgaaagggattcttttctgaaggaggttgtgtcactcagtgtctgatgaggatatagaagtcagtgtttggtgagagatagtaatttgaagagggaacatttactataaagaattattaactggcaaaatgtgataaactacaaaaggggtaaattgtatgctaaataacacagaaatagcaaacatagggaagagctgctacttctaggactgagggaggatacccaagaaaagaacaaacatggaagggtctttcacacct

SEQ ID NO: 618 - DNA, 1000 bp, Homo sapiens
aaggctgagattcagaccttgttggagagggtggtgctgtggcccgcaggatagaaaagttctttgaggtgccacaggccaggcctggtgagtagggtactggctgttgggtgccagtggatcagcactgtggtcaaaaaagtgccttctagggtgctggaaaaacccactggaaggtggtcaccattgggtctcctgcatactgctggcaaggaaattgcctgctcgggtgacaataaaactcagtaggaagccctcactaggtgctggtggaactcactgtagggtgactctcccatacaccactggtggcggccacaggtaacaagaaccaggaagaatcaagaaggaatgctcctttatttgctataccttgttttattttattttatttatttatttttttgagacagagttttgccttttttccctggctggagtgcaatgatgcgatcttggctcactgcaacctccacctcccaggttcaagtgattctcctgcctcagcctcccgagtagctgggattacaggtgcgtgctaattttgtattttcagtagagatggggttttaccatgttgtccaggctggtctcaaactcctggcctcaggtgatcctcctgcctctgcctcccaaagggctgtgattacaggcatgagacaccgcatctgacccctttactataccttgtagtgtctcccctacactctaccagcaacagatgacattgcactggctgaccgaggagccagattagtatcgtggaacagggcaaagaagggtggatttggagcggagaggcaatatattgataactgtcttggtgaactcctttggcttcttagcttccacatgcaccattttatatatatatttgaactctgtataacacaaagtcaactctgttcttcagagaaatgcagagttctcacccctttccccaaatgaggagacacacagttccaacagttatcgtagtctcatctggctgtcttaaata

SEQ ID NO: 619 - DNA, 300 bp, Homo sapiens
tatgatgagatttcatttttaatggctgaatagtattttgttgtgtatatataccatattttctttattcattcatctgttgatggacacttaggttgatttcataccttggctgttgtgaatagagcagcaataaatatgggggtacagttgtccctttgatttattgatttcctttcctttggacagagagacagtagtgggattgctgggtcagatggtagttctatttttagtttttaaagacactttcatactgttttccatagtcgttgtactaatctacattcccaacaatgc

SEQ ID NO: 620 - DNA, 300 bp, Homo sapiens
taaagagttcccttttctccacataatcaccagcatgtgttattttttgactttgataataaccattctaactggggtgagatggtatctcattgtggttttgatctgtattttcctgatgatccgtgatgttgagcagtttttcctaaacctgttagccatttgtctttttagaaatgtctattcatgtcctttgctcactttttagtgagattatttgattctttgctgtcgaattgttttgagttctatgtatattctggatattagtcccttgttggatgaatagttagcaatttt

SEQ ID NO: 621 - DNA, 225 bp, Homo sapiens
ctttcagatgttctcaaaacaatttgtattaagagctaataaaatgaaacagaaaatgccaggtaaactttttaaaataaagattttgtgattcattgggtttaattattggttttattttagcattactttgatacatttcatgaagtatacagacagaactaaagccacatttaaaaggcaattaataaaacccagacattatgatataatttacatacattt

SEQ ID NO: 622 - DNA, 300 bp, Homo sapiens
gatatatttaaagtgtacagttcatttatttagtataaccacagagttgtgcaaacatcaccaccatctaattctagaacatgttagaaccccaaaagaaacttcatattcattagcatgttgcattcctggcagctccctcttgccaccctgtaccctcagtcctaggcaaccactaaacaactttctgtcctcatagacttgtctattctagacatttcctataaatggcatcatacgatatgtggtattttgtgactggctctggcttctttcacttagtataatgctttcacattt
